(19) United States
(12) Patent Application Publication
(10) Pub. No.: US 2024/0200114 A1
(43) Pub. Date: Jun. 20, 2024

(54) BIOSYNTHESIS OF MOGROSIDES

(71) Applicant: GINKGO BIOWORKS, INC., Boston, MA (US)

(72) Inventors: Guillaume Beaudoin, Cambridge, MA (US); Alexandra Exner, Boston, MA (US); Annapurna Kamineni, Watertown, MA (US); Matthew McMahon, Melrose, MA (US); Joshua Trueheart, Waltham, MA (US)

(73) Assignee: GINKGO BIOWORKS, INC., Boston, MA (US)

(21) Appl. No.: 18/285,018

(22) PCT Filed: Apr. 1, 2022
(86) PCT No.: PCT/US2022/023173

§ 371 Date: Sep. 29, 2023

Related U.S. Application Data
(60) Provisional application No. 63/170,324, filed on Apr. 2, 2021.

(51) Int. Cl. C12P 19/56; C12N 9/02; C12N 9/10; C12N 9/14; C12N 9/90; C12P 19/60

(52) U.S. Cl. CPC C12P 19/56; C12N 9/0071; C12N 9/1051; C12N 9/14; C12N 9/90; C12P 19/60; C12Y 114/19; C12Y 204/01017; C12Y 303/02009; C12Y 504/99007

(57) ABSTRACT

Described in this application are proteins and host cells involved in methods of producing mogrol precursors, mogrol, and/or mogrosides.

### CROSS-REFERENCE TO RELATED APPLICATIONS

[0001] This application claims the benefit under 35 U.S.C. § 119(e) of U.S. Provisional Application No. 63/170,324, filed Apr. 2, 2021, entitled “BIOSYNTHESIS OF MOGROSIDES,” the entire disclosure of which is hereby incorporated by reference in its entirety.

### REFERENCE TO A SEQUENCE LISTING SUBMITTED AS A TEXT FILE VIA EFS-WEB

[0002] The instant application contains a Sequence Listing which has been submitted in ASCII format via EFS-Web and is hereby incorporated by reference in its entirety. The ASCII file, created on Apr. 1, 2022, is named G091970077WO00-SEQ-FL.TXT and is 886,131 bytes in size.

### FIELD OF THE INVENTION

[0003] The present disclosure relates to the production of mogrol precursors, mogrol and mogrosides in recombinant cells.

### BACKGROUND

[0004] Mogrosides are glycosides of cucurbitane derivatives. Highly sought after as sweeteners and sugar alternatives, mogrosides are naturally synthesized in the fruits of plants, including Siraitia grosvenorii (S. grosvenorii). Although anti-cancer, anti-oxidative, and anti-inflammatory properties have been ascribed to mogrosides, characterization of the exact proteins involved in mogroside biosynthesis is limited. Furthermore, mogroside extraction from fruit is labor-intensive and the structural complexity of mogrosides often hinders de novo chemical synthesis.

### SUMMARY

[0005] Aspects of the disclosure relate to host cells for producing mogrol, one or more mogrol precursors, and/or one or more mogrosides. In some embodiments, the host cell comprises a heterologous polynucleotide encoding a lanosterol synthase with reduced activity as compared to a wild-type lanosterol synthase, wherein the host cell is capable of producing:
[0006] (a) one or more mogrol precursors selected from the group consisting of: squalene, 2-3-oxidosqualene, 2,3,22,23-dioxidosqualene, cucurbitadienol, 24, 25-expoxycucurbitadienol, 11-hydroxycucurbitadienol, 11-hydroxy-24,25-epoxycucurbitadienol, 11-hydroxycucurbitadienol, 11-oxo-cucurbitadienol, and 24,25-dihydroxycucurbitadienol;
[0007] (b) mogrol; and/or
[0008] (c) one or more mogrosides.

[0009] In some embodiments, the host cell comprises a heterologous polynucleotide encoding a lanosterol synthase, wherein the lanosterol synthase comprises an amino acid substitution or deletion relative to SEQ ID NO: 1 at one or more residues corresponding to position 14, 33, 47, 50, 66, 80, 83, 85, 92, 94, 107, 122, 132, 145, 158, 170, 172, 184, 193, 197, 198, 212, 213, 227, 228, 231, 235, 248, 249, 260, 282, 286, 287, 289, 295, 296, 309, 314, 316, 329, 344, 360, 370, 371, 372, 398, 407, 414, 417, 423, 432, 437, 442, 444, 452, 474, 479, 491, 498, 515, 526, 529, 536, 544, 552, 559, 560, 564, 578, 586, 608, 610, 617, 619, 620, 631, 638, 650, 655, 660, 679, 686, 702, 710, 726, 736, 738, and/or 742 in SEQ ID NO: 1.

[0010] In some embodiments, the lanosterol synthase comprises 2, 3, 4, 5, 6, 7, 8, 9, 10, 11, or 12 amino acid substitutions and/or deletions relative to SEQ ID NO: 1. In some embodiments, the lanosterol synthase comprises: the amino acid Y at the residue corresponding to position 14 in SEQ ID NO:1; the amino acid Q at the residue corresponding to position 33 in SEQ ID NO:1; the amino acid E at the residue corresponding to position 47 in SEQ ID NO:1; the amino acid G at the residue corresponding to position 50 in SEQ ID NO:1; the amino acid R at the residue corresponding to position 66 in SEQ ID NO: 1; the amino acid G at the residue corresponding to position 80 in SEQ ID NO: 1; the amino acid L at the residue corresponding to position 83 in SEQ ID NO: 1; the amino acid N at the residue corresponding to position 85 in SEQ ID NO:1; the amino acid I at the residue corresponding to position 92 in SEQ ID NO: 1; the amino acid S at the residue corresponding to position 94 in SEQ ID NO:1; the amino acid D at the residue corresponding to position 107 in SEQ ID NO:1; the amino acid C at the residue corresponding to position 122 in SEQ ID NO:1; the amino acid S at the residue corresponding to position 132 in SEQ ID NO:1; the amino acid C at the residue corresponding to position 145 in SEQ ID NO:1; the amino acid S at the residue corresponding to position 158 in SEQ ID NO:1; the amino acid A at the residue corresponding to position 170 in SEQ ID NO: 1; the amino acid N at the residue corresponding to position 172 in SEQ ID NO:1; the amino acid W at the residue corresponding to position 184 in SEQ ID NO:1; the amino acid C or H at the residue corresponding to position 193 in SEQ ID NO:1; the amino acid V at the residue corresponding to position 197 in SEQ ID NO:1; the amino acid I at the residue corresponding to position 198 in SEQ ID NO: 1; the amino acid I at the residue corresponding to position 212 in SEQ ID NO: 1; the amino acid L at the residue corresponding to position 213 in SEQ ID NO:1; the amino acid L at the residue corresponding to position 227 in SEQ ID NO:1; the amino acid T at the residue corresponding to position 228 in SEQ ID NO: 1; the amino acid V at the residue corresponding to position 231 in SEQ ID NO: 1; the amino acid M at the residue corresponding to position 235 in SEQ ID NO:1; the amino acid F at the residue corresponding to position 248 in SEQ ID NO:1; the amino acid L at the residue corresponding to position 249 in SEQ ID NO:1; the amino acid R at the residue corresponding to position 260 in SEQ ID NO:1; the amino acid I at the residue corresponding to position 282 in SEQ ID NO:1; the amino acid F at the residue corresponding to position 286 in SEQ ID NO: 1; the amino acid G at the residue corresponding to position 287 in SEQ ID NO:1; the amino acid G at the residue corresponding to position 289 in SEQ ID NO: 1; the amino acid I at the residue corresponding to position 295 in SEQ ID NO: 1; the amino acid T at the residue corresponding to position 296 in SEQ ID NO: 1; the amino acid F at the residue corresponding to position 309 in SEQ ID NO: 1; the amino acid S at the residue corresponding to position 314 in SEQ ID NO:1; the amino acid R at the residue corresponding to position 316 in SEQ ID NO:1; the amino acid N at the residue corresponding to position 329 in SEQ ID NO: 1; the amino acid A at the residue corresponding to position 344 in SEQ ID NO: 1; the amino acid S at the residue corresponding to position 360 in SEQ ID NO:1; the amino acid L at the residue corresponding to position 370 in SEQ ID NO:1; the amino acid V at the residue corresponding to position 371 in SEQ ID NO:1; the amino acid P at the residue corresponding to position 372 in SEQ ID NO:1; the amino acid I at the residue corresponding to position 398 in SEQ ID NO: 1; the amino acid V at the residue corresponding to position 407 in SEQ ID NO:1; the amino acid S at the residue corresponding to position 414 in SEQ ID NO:1; the amino acid S at the residue corresponding to position 417 in SEQ ID NO:1; the amino acid L at the residue corresponding to position 423 in SEQ ID NO:1; the amino acid I or S at the residue corresponding to position 432 in SEQ ID NO:1; the amino acid L at the residue corresponding to position 437 in SEQ ID NO:1; the amino acid V at the residue corresponding to position 442 in SEQ ID NO:1; the amino acid M or S at the residue corresponding to position 444 in SEQ ID NO:1; the amino acid G at the residue corresponding to position 452 in SEQ ID NO:1; the amino acid V at the residue corresponding to position 474 in SEQ ID NO:1; the amino acid S at the residue corresponding to position 479 in SEQ ID NO:1; the amino acid Q at the residue corresponding to position 491 in SEQ ID NO:1; the amino acid N at the residue corresponding to position 498 in SEQ ID NO: 1; the amino acid L at the residue corresponding to position 515 in SEQ ID NO:1; the amino acid T at the residue corresponding to position 526 in SEQ ID NO: 1; the amino acid T at the residue corresponding to position 529 in SEQ ID NO: 1; the amino acid F at the residue corresponding to position 536 in SEQ ID NO:1; the amino acid Y at the residue corresponding to position 544 in SEQ ID NO:1; the amino acid E at the residue corresponding to position 552 in SEQ ID NO:1; the amino acid A at the residue corresponding to position 559 in SEQ ID NO:1; the amino acid M at the residue corresponding to position 560 in SEQ ID NO: 1; the amino acid C or N at the residue corresponding to position 564 in SEQ ID NO:1; the amino acid P at the residue corresponding to position 578 in SEQ ID NO:1; the amino acid F at the residue corresponding to position 586 in SEQ ID NO:1; the amino acid T at the residue corresponding to position 608 in SEQ ID NO:1; the amino acid I at the residue corresponding to position 610 in SEQ ID NO: 1; the amino acid V at the residue corresponding to position 617 in SEQ ID NO:1; the amino acid L at the residue corresponding to position 619 in SEQ ID NO:1; the amino acid S at the residue corresponding to position 620 in SEQ ID NO:1; the amino acid E or R at the residue corresponding to position 631 in SEQ ID NO:1; the amino acid D at the residue corresponding to position 638 in SEQ ID NO:1; the amino acid L at the residue corresponding to position 650 in SEQ ID NO:1; the amino acid A at the residue corresponding to position 655 in SEQ ID NO:1; the amino acid H at the residue corresponding to position 660 in SEQ ID NO:1; the amino acid S at the residue corresponding to position 679 in SEQ ID NO:1; the amino acid E at the residue corresponding to position 686 in SEQ ID NO: 1; the amino acid D at the residue corresponding to position 702 in SEQ ID NO: 1; the amino acid Q at the residue corresponding to position 710 in SEQ ID NO:1; the amino acid L or V at the residue corresponding to position 726 in SEQ ID NO: 1; the amino acid F at the residue corresponding to position 736 in SEQ ID NO:1; the amino acid M at the residue corresponding to position 738 in SEQ ID NO:1; and/or a truncation that results in deletion of the residue corresponding to position 742 in SEQ ID NO: 1.

[0011] In some embodiments, the lanosterol synthase comprises the amino acid substitution E617V, G107D, and/or K631E relative to SEQ ID NO: 1. In some embodiments, relative to SEQ ID NO: 1, the lanosterol synthase comprises: R33Q, R193C, D289G, N295I, S296T, N620S, and Y736F; R184W, L235M, L260R, and E710Q; K47E, L92I, T360S, S372P, T444M, and R578P; D50G, K66R, N94S, G417S, E617V, and F726L; N14Y, N132S, Y145C, R193H, I286F, L316R, F432I, E442V, T444S, I479S, K631R, and T655A; F432S, D452G, and I536F; E287G, K329N, E617V, and F726V; E231V, A407V, Q423L, A529T, and Y564C; V248F, D371V, and G702D; L197V, K282I, N314S, P370L, A608T, G638D, and F650L; L491Q, Y586F, and R660H; G122C, H249L, and K738M; P227L, E474V, V559A, and Y564N; K85N, G158S, S515L, P526T, Q619L, and a truncation resulting in a deletion of the residue corresponding to Q742 in SEQ ID NO: 1; G107D and K631E; T212I, W213L, N544Y, and V552E; I172N, C414S, L560M, and G679S; R193C, D289G, N295I, S296T, N620S, and Y736F; K85N and G158S; L197V, K282I, N314S, and P370L; I172N, C414S, and L560M; D371V, M610I, and G702D; D371V, K498N, M610I, and G702D; D80G, P83L, T170A, T198I, and A228T; T360S, S372P, T444M, and R578P; D50G, K66R, N94S, G417S, and E617V; or L309F, V344A, T398I, and K686E.

[0012] In some embodiments, relative to SEQ ID NO: 1, the lanosterol synthase comprises the following amino acid substitutions: R193C, D289G, N295I, S296T, N620S, and Y736F; F432S, D452G, and I536F; K85N and G158S; L197V, K282I, N314S, and P370L; I172N, C414S, L560M, and G679S; I172N, C414S, and L560M; D371V, M610I, and G702D; D371V, K498N, M610I, and G702D; D80G, P83L, T170A, T198I, and A228T; D50G, K66R, N94S, G417S, E617V, and F726L; T360S, S372P, T444M, and R578P; D50G, K66R, N94S, G417S, and E617V; and L309F, V344A, T398I, and K686E.

[0013] In some embodiments, relative to SEQ ID NO: 1, the lanosterol synthase comprises the following amino acid substitutions: D50G, K66R, N94S, G417S, E617V, and F726L; K85N and G158S; K47E, L92I, T360S, S372P, T444M, and R578P; F432S, D452G, and I536F; T360S, S372P, T444M, and R578P; L491Q, Y586F, and R660H; K85N, G158S, S515L, P526T, Q619L, and a truncation that results in deletion of the residue corresponding to position 742 in SEQ ID NO: 1; or I172N, C414S, L560M, and G679S.

[0014] In some embodiments, the lanosterol synthase comprises an amino acid substitution or deletion relative to SEQ ID NO: 1 at one or more residues corresponding to position 14, 33, 47, 50, 66, 85, 92, 94, 122, 132, 145, 158, 193, 231, 248, 249, 286, 287, 289, 295, 296, 316, 329, 360, 371, 372, 407, 417, 423, 432, 442, 444, 479, 515, 526, 529, 564, 578, 617, 619, 620, 631, 655, 702, 726, 736, 738, and/or 742 in SEQ ID NO: 1. In some embodiments, the lanosterol synthase comprises relative to SEQ ID NO: 1: R33Q, R193C, D289G, N295I, S296T. N620S, and Y736F; K47E, L92I, T360S, S372P, T444M, and R578P; D50G, K66R, N94S, G417S, E617V, and F726L; N14Y, N132S, Y145C, R193H, I286F, L316R, F432I, E442V, T444S, I479S, K631R, and T655A; E287G, K329N, E617V, and F726V; E231V, A407V, Q423L, A529T, and Y564C; V248F, D371V, and G702D; G122C, H249L, and K738M; or K85N, G158S, S515L, P526T, and Q619L, and a truncation resulting in a deletion of the residue corresponding to Q742 in SEQ ID NO: 1.

[0015] In some embodiments, the lanosterol synthase comprises a sequence that is at least 90% identical to SEQ ID NO: 3, 83-87, 89-92, 94-95, 99, 118-120, 316-319, 321-326, 329, or 331. In some embodiments, the lanosterol synthase comprises SEQ ID NO: 3, 83-87, 89-92, 94-95, 99, 118-120, 316-319, 321-326, 329, or 331. In some embodiments, the heterologous polynucleotide comprises a sequence that is at least 90% identical to SEQ ID NO: 4, 62-66, 68-71, 73-74, 78, 103-109, 111-117, 328, or 330. In some embodiments, the heterologous polynucleotide comprises the sequence of SEQ ID NO: 4, 62-66, 68-71, 73-74, 78, 103-109, 111-117, 328, or 330.

[0016] Further aspects of the disclosure relate to host cells that comprise a heterologous polynucleotide encoding a lanosterol synthase, wherein the lanosterol synthase comprises a sequence that is at least 90% identical to SEQ ID NO: 3, 83-87, 89-92, 94-95, 99, 100-102, 118-120, 316-319, 321-326, 329, or 331. In some embodiments, the lanosterol synthase comprises the sequence of SEQ ID NO: 3, 83-87, 89-92, 94-95, 99, 100-102, 118-120, 316-319, 321-326, 329, or 331.

[0017] Further aspects of the disclosure relate to host cells that comprise a heterologous polynucleotide encoding a lanosterol synthase, wherein the lanosterol synthase comprises relative to SEQ ID NO: 1: R33Q, R193C, D289G, N295I, S296T, N620S, and Y736F; K47E, L92I, T360S, S372P, T444M, and R578P; D50G, K66R, N94S, G417S, E617V, and F726L; N14Y, N132S, Y145C, R193H, I286F, L316R, F432I, E442V, T444S, I479S, K631R, and T655A; E287G, K329N, E617V, and F726V; E231V, A407V, Q423L, A529T, and Y564C; V248F, D371V, and G702D; G122C, H249L, and K738M; or K85N, G158S, S515L, P526T, and Q619L, and a truncation resulting in a deletion of the residue corresponding to Q742 in SEQ ID NO: 1.

[0018] Further aspects of the disclosure relate to host cells that comprise a heterologous polynucleotide encoding a lanosterol synthase, wherein the heterologous polynucleotide comprises a sequence that is at least 90% identical to SEQ ID NO: 4, 62-66, 68-71, 73-74, 78, 80-82, 103-109, 111-117, 328, or 330. In some embodiments, the heterologous polynucleotide comprises SEQ ID NO: 4, 62-66, 68-71, 73-74, 78, 80-82, 103-109, 111-117, 328, or 330.

[0019] In some embodiments, the host cell comprises a heterologous polynucleotide encoding a lanosterol synthase, wherein the lanosterol synthase comprises an amino acid substitution or deletion relative to SEQ ID NO: 313 at one or more residues corresponding to position 64, 120, 121, 136, 226, 268, 275, 281, 300, 322, 333, 438, 502, 604, 619, 628, 656, 693, 726, 727, 728, 729, 730, and/or 731.

[0020] In some embodiments, the lanosterol synthase comprises: the amino acid G at the residue corresponding to position 64 in SEQ ID NO: 313; the amino acid V at the residue corresponding to position 120 in SEQ ID NO: 313; the amino acid S at the residue corresponding to position 121 in SEQ ID NO: 313; the amino acid V at the residue corresponding to position 136 in SEQ ID NO: 313; the amino acid I at the residue corresponding to position 226 in SEQ ID NO: 313; the amino acid S at the residue corresponding to position 268 in SEQ ID NO: 313; the amino acid I at the residue corresponding to position 275 in SEQ ID NO: 313; the amino acid A at the residue corresponding to position 281 in SEQ ID NO: 313; the amino acid G at the residue corresponding to position 300 in SEQ ID NO: 313; the amino acid G at the residue corresponding to position 322 in SEQ ID NO: 313; the amino acid A at the residue corresponding to position 333 in SEQ ID NO: 313; the amino acid E at the residue corresponding to position 438 in SEQ ID NO: 313; the amino acid L at the residue corresponding to position 502 in SEQ ID NO: 313; the amino acid N at the residue corresponding to position 604 in SEQ ID NO: 313; the amino acid S at the residue corresponding to position 619 in SEQ ID NO: 313; the amino acid E at the residue corresponding to position 628 in SEQ ID NO: 313; the amino acid T at the residue corresponding to position 656 in SEQ ID NO: 313; the amino acid G at the residue corresponding to position 693 in SEQ ID NO: 313; and/or deletion of residues corresponding to positions 726-731 in SEQ ID NO: 313.

[0021] In some embodiments, the lanosterol synthase comprises relative to SEQ ID NO: 313: P121S, A136V, S300G, V322G, K438E, F502L, K628E, and deletion of residues corresponding to positions 726-731 in SEQ ID NO: 313; K268S, T281A, F502L, T604N, A656T, and E693G; or C619S, F275I, I120V, M226I, R64G, and T333A.

[0022] In some embodiments, the lanosterol synthase comprises a sequence that is at least 90% identical to any one of SEQ ID NOs: 100-102.

[0023] In some embodiments, the lanosterol synthase comprises a sequence selected from SEQ ID NOs: 100-102.

[0024] In some embodiments, the heterologous polynucleotide encoding the lanosterol synthase comprises a sequence that is at least 90% identical to a sequence selected from SEQ ID NOs: 80-82.

[0025] In some embodiments, the heterologous polynucleotide encoding the lanosterol synthase comprises a sequence selected from SEQ ID NOs: 80-82.

[0026] In some embodiments, the host cell is capable of producing mevalonate. In some embodiments, the host cell is capable of producing at least 0.2 g/L mevalonate. In some embodiments, the host cell is capable of producing at least 0.7 g/L mevalonate. In some embodiments, the host cell is capable of producing at least 9 mg/L cucurbitadienol. In some embodiments, the host cell is capable of producing at least 1.1 fold more cucurbitadienol than a control host cell comprising SEQ ID NO: 1 and/or a control host cell comprising SEQ ID NO: 313. In some embodiments, the host cell is capable of producing at least 3 fold more cucurbitadienol than a control host cell comprising SEQ ID NO: 1 and/or a control host cell comprising SEQ ID NO: 313. In some embodiments, the host cell is capable of producing at most 200 mg/L lanosterol. In some embodiments, the host cell is capable of producing at least 5 mg/L oxidosqualene.

[0027] In some embodiments, the host cell is capable of producing more mevalonate than a control host cell that does not comprise the heterologous polynucleotide.

[0028] In some embodiments, the host cell further comprises one or more heterologous polynucleotides encoding one or more of: a UDP-glycosyltransferases (UGT) enzyme, a cucurbitadienol synthase (CDS) enzyme, a C11 hydroxylase, an epoxide hydrolase (EPH), and squalene epoxidase (SQE). In some embodiments, the UGT enzyme comprises a sequence that is at least 90% identical to SEQ ID NO: 121. In some embodiments, the CDS enzyme comprises a sequence that is at least 90% identical to any one of SEQ ID NOs: 226, SEQ ID NO: 235, SEQ ID NO: 232, and SEQ ID NO: 256. In some embodiments, the C11 hydroxylase comprises a sequence that is at least 90% identical to any one of SEQ ID NOS: 280-281, 305, and 315. In some embodiments, the EPH comprises a sequence that is at least 90% identical to any one of SEQ ID NO: 284-292 and 309-310. In some embodiments, the SQE comprises a sequence that is at least 90% identical to any one of SEQ ID NOs: 293-295 and 312. In some embodiments, the host cell further comprises a heterologous polynucleotide encoding a cytochrome P450 reductase. In some embodiments, the cytochrome P450 reductase comprises a sequence that is at least 90% identical to any one of SEQ ID NOs: 282-283 and 306-307. In some embodiments, the host cell further comprises a heterologous polynucleotide encoding a cytochrome P450 reductase with reduced activity as compared to a control cytochrome P450 reductase or a heterologous polynucleotide that reduces cytochrome P450 activity. In some embodiments, the control cytochrome P450 reductase is a wild-type P450 reductase.

[0029] In some embodiments, the host cell is a yeast cell, a plant cell, or a bacterial cell. In some embodiments, the host cell is a yeast cell. In some embodiments, the yeast cell is a Saccharomyces cerevisiae cell. In some embodiments, the yeast cell is a Yarrowia lipolytica cell. In some embodiments, the host cell is a bacterial cell. In some embodiments, the bacterial cell is an E. coli cell.

[0030] In some embodiments, the host cell further comprises a heterologous polynucleotide encoding an acetoacetyl CoA synthase. In some embodiments, the acetoacetyl CoA synthase comprises a sequence that is at least 90% identical to SEQ ID NO: 6. In some embodiments, the heterologous polynucleotide encoding the acetoacetyl CoA synthase comprises a sequence that is at least 90% identical to SEQ ID NO: 7.

[0031] In some embodiments, the one or more mogrosides is selected from mogroside I-A1 (MIA1), mogroside IE (MIE), mogroside II-A1 (MIIA1), mogroside II-A2 (MIIA2), mogroside III-A1 (MIIIA1), mogroside II-E (MIIE), mogroside III (MIII), siamenoside I, mogroside IV (MIV), mogroside IVa (MIVA), isomogroside IV, mogroside III-E (MIIIE), mogroside V (MV), mogroside VIA (MVIA), mogroside VIB (MVIB), isomogroside V, mogroside VIa1 (MVIa1), and/or mogroside VI (MVI).

[0032] Further aspects of the disclosure relate to methods of producing a mogroside comprising culturing any of the host cells associated with the disclosure.

[0033] Further aspects of the disclosure relate to methods of producing mogrol comprising culturing any of the host cells associated with the disclosure.

[0034] In some embodiments, the mogroside is selected from mogroside I-A1 (MIA1), mogroside IE (MIE), mogroside II-A1 (MIIA1), mogroside II-A2 (MIIA2), mogroside III-A1 (MIIIA1), mogroside II-E (MIIE), mogroside III (MIII), siamenoside I, mogroside IV (MIV), mogroside IVa (MIVA), isomogroside IV, mogroside III-E (MIIIE), mogroside V (MV), mogroside VIA (MVIA), mogroside VIB (MVIB), isomogroside V, mogroside VIa1 (MVIa1), and/or mogroside VI (MVI).

[0035] Further aspects of the disclosure relate to methods of producing mogrol, one or more mogrol precursors, and/or one or more mogrosides comprising culturing a host cell that comprises a heterologous polynucleotide encoding a lanosterol synthase, wherein the lanosterol synthase comprises an amino acid substitution or deletion relative to SEQ ID NO: 1 at one or more residues corresponding to position 14, 33, 47, 50, 66, 80, 83, 85, 92, 94, 107, 122, 132, 145, 158, 170, 172, 184, 193, 197, 198, 212, 213, 227, 228, 231, 235, 248, 249, 260, 282, 286, 287, 289, 295, 296, 309, 314, 316, 329, 344, 360, 370, 371, 372, 398, 407, 414, 417, 423, 432, 437, 442, 444, 452, 474, 479, 491, 498, 515, 526, 529, 536, 544, 552, 559, 560, 564, 578, 586, 608, 610, 617, 619, 620, 631, 638, 650, 655, 660, 679, 686, 702, 710, 726, 736, 738, and/or 742 in SEQ ID NO: 1 and wherein the host cell is capable of producing:
[0036] (a) one or more mogrol precursors selected from the group consisting of: squalene, 2-3-oxidosqualene, 2,3,22,23-dioxidosqualene, cucurbitadienol, 24, 25-expoxycucurbitadienol, 11-hydroxycucurbitadienol, 11-hydroxy-24,25-epoxycucurbitadienol, 11-hydroxycucurbitadienol, 11-oxo-cucurbitadienol, and 24,25-dihydroxycucurbitadienol;
[0037] (b) mogrol; and/or
[0038] (c) one or more mogrosides.

[0039] In some embodiments, the lanosterol synthase comprises 2, 3, 4, 5, 6, 7, 8, 9, 10, 11, or 12 amino acid substitutions and/or deletions relative to SEQ ID NO: 1. In some embodiments, the lanosterol synthase comprises: the amino acid Y at the residue corresponding to position 14 in SEQ ID NO:1; the amino acid Q at the residue corresponding to position 33 in SEQ ID NO:1; the amino acid E at the residue corresponding to position 47 in SEQ ID NO:1; the amino acid G at the residue corresponding to position 50 in SEQ ID NO:1; the amino acid R at the residue corresponding to position 66 in SEQ ID NO:1; the amino acid G at the residue corresponding to position 80 in SEQ ID NO: 1; the amino acid L at the residue corresponding to position 83 in SEQ ID NO: 1; the amino acid N at the residue corresponding to position 85 in SEQ ID NO:1; the amino acid I at the residue corresponding to position 92 in SEQ ID NO:1; the amino acid S at the residue corresponding to position 94 in SEQ ID NO:1; the amino acid D at the residue corresponding to position 107 in SEQ ID NO:1; the amino acid C at the residue corresponding to position 122 in SEQ ID NO:1; the amino acid S at the residue corresponding to position 132 in SEQ ID NO:1; the amino acid C at the residue corresponding to position 145 in SEQ ID NO: 1; the amino acid S at the residue corresponding to position 158 in SEQ ID NO:1; the amino acid A at the residue corresponding to position 170 in SEQ ID NO: 1; the amino acid N at the residue corresponding to position 172 in SEQ ID NO:1; the amino acid W at the residue corresponding to position 184 in SEQ ID NO:1; the amino acid C or H at the residue corresponding to position 193 in SEQ ID NO:1; the amino acid V at the residue corresponding to position 197 in SEQ ID NO:1; the amino acid I at the residue corresponding to position 198 in SEQ ID NO: 1; the amino acid I at the residue corresponding to position 212 in SEQ ID NO:1; the amino acid L at the residue corresponding to position 213 in SEQ ID NO:1; the amino acid L at the residue corresponding to position 227 in SEQ ID NO:1; the amino acid T at the residue corresponding to position 228 in SEQ ID NO: 1; the amino acid V at the residue corresponding to position 231 in SEQ ID NO:1; the amino acid M at the residue corresponding to position 235 in SEQ ID NO:1; the amino acid F at the residue corresponding to position 248 in SEQ ID NO:1; the amino acid L at the residue corresponding to position 249 in SEQ ID NO:1; the amino acid R at the residue corresponding to position 260 in SEQ ID NO:1; the amino acid I at the residue corresponding to position 282 in SEQ ID NO:1; the amino acid F at the residue corresponding to position 286 in SEQ ID NO: 1; the amino acid G at the residue corresponding to position 287 in SEQ ID NO:1; the amino acid G at the residue corresponding to position 289 in SEQ ID NO: 1; the amino acid I at the residue corresponding to position 295 in SEQ ID NO: 1; the amino acid T at the residue corresponding to position 296 in SEQ ID NO: 1; the amino acid F at the residue corresponding to position 309 in SEQ ID NO: 1; the amino acid S at the residue corresponding to position 314 in SEQ ID NO: 1; the amino acid R at the residue corresponding to position 316 in SEQ ID NO:1; the amino acid N at the residue corresponding to position 329 in SEQ ID NO:1; the amino acid A at the residue corresponding to position 344 in SEQ ID NO: 1; the amino acid S at the residue corresponding to position 360 in SEQ ID NO:1; the amino acid L at the residue corresponding to position 370 in SEQ ID NO:1; the amino acid V at the residue corresponding to position 371 in SEQ ID NO:1; the amino acid P at the residue corresponding to position 372 in SEQ ID NO:1; the amino acid I at the residue corresponding to position 398 in SEQ ID NO: 1; the amino acid V at the residue corresponding to position 407 in SEQ ID NO:1; the amino acid S at the residue corresponding to position 414 in SEQ ID NO:1; the amino acid S at the residue corresponding to position 417 in SEQ ID NO:1; the amino acid L at the residue corresponding to position 423 in SEQ ID NO: 1; the amino acid I or S at the residue corresponding to position 432 in SEQ ID NO: 1; the amino acid L at the residue corresponding to position 437 in SEQ ID NO:1; the amino acid V at the residue corresponding to position 442 in SEQ ID NO:1; the amino acid M or S at the residue corresponding to position 444 in SEQ ID NO:1; the amino acid G at the residue corresponding to position 452 in SEQ ID NO:1; the amino acid V at the residue corresponding to position 474 in SEQ ID NO:1; the amino acid S at the residue corresponding to position 479 in SEQ ID NO:1; the amino acid Q at the residue corresponding to position 491 in SEQ ID NO:1; the amino acid N at the residue corresponding to position 498 in SEQ ID NO: 1; the amino acid L at the residue corresponding to position 515 in SEQ ID NO:1; the amino acid T at the residue corresponding to position 526 in SEQ ID NO:1; the amino acid T at the residue corresponding to position 529 in SEQ ID NO:1; the amino acid F at the residue corresponding to position 536 in SEQ ID NO:1; the amino acid Y at the residue corresponding to position 544 in SEQ ID NO:1; the amino acid E at the residue corresponding to position 552 in SEQ ID NO:1; the amino acid A at the residue corresponding to position 559 in SEQ ID NO: 1; the amino acid M at the residue corresponding to position 560 in SEQ ID NO:1; the amino acid C or N at the residue corresponding to position 564 in SEQ ID NO:1; the amino acid P at the residue corresponding to position 578 in SEQ ID NO:1; the amino acid F at the residue corresponding to position 586 in SEQ ID NO:1; the amino acid T at the residue corresponding to position 608 in SEQ ID NO:1; the amino acid I at the residue corresponding to position 610 in SEQ ID NO: 1; the amino acid V at the residue corresponding to position 617 in SEQ ID NO: 1; the amino acid L at the residue corresponding to position 619 in SEQ ID NO:1; the amino acid S at the residue corresponding to position 620 in SEQ ID NO:1; the amino acid E or R at the residue corresponding to position 631 in SEQ ID NO: 1; the amino acid D at the residue corresponding to position 638 in SEQ ID NO: 1; the amino acid L at the residue corresponding to position 650 in SEQ ID NO: 1; the amino acid A at the residue corresponding to position 655 in SEQ ID NO:1; the amino acid H at the residue corresponding to position 660 in SEQ ID NO:1; the amino acid S at the residue corresponding to position 679 in SEQ ID NO:1; the amino acid E at the residue corresponding to position 686 in SEQ ID NO: 1; the amino acid D at the residue corresponding to position 702 in SEQ ID NO:1; the amino acid Q at the residue corresponding to position 710 in SEQ ID NO:1; the amino acid L or V at the residue corresponding to position 726 in SEQ ID NO:1; the amino acid F at the residue corresponding to position 736 in SEQ ID NO:1; the amino acid M at the residue corresponding to position 738 in SEQ ID NO:1; and/or a truncation that results in deletion of the residue corresponding to position 742 in SEQ ID NO: 1.

[0040] In some embodiments, the lanosterol synthase comprises the amino acid substitution E617V, G107D, and/or K631E relative to SEQ ID NO: 1. In some embodiments, relative to SEQ ID NO: 1, the lanosterol synthase comprises: R33Q, R193C, D289G, N295I, S296T, N620S, and Y736F; R184W, L235M, L260R, and E710Q; K47E, L92I, T360S, S372P, T444M, and R578P; D50G, K66R, N94S, G417S, E617V, and F726L; N14Y, N132S, Y145C, R193H, I286F, L316R, F432I, E442V, T444S, I479S, K631R, and T655A; F432S, D452G, and I536F; E287G, K329N, E617V, and F726V; E231V, A407V, Q423L, A529T, and Y564C; V248F, D371V, and G702D; L197V, K282I, N314S, P370L, A608T, G638D, and F650L; L491Q, Y586F, and R660H; G122C, H249L, and K738M; P227L, E474V, V559A, and Y564N; K85N, G158S, S515L, P526T, Q619L, and a truncation resulting in a deletion of the residue corresponding to Q742 in SEQ ID NO: 1; G107D and K631E; T212I, W213L, N544Y, and V552E; I172N, C414S, L560M, and G679S; R193C, D289G, N295I, S296T, N620S, and Y736F; K85N and G158S; L197V, K282I, N314S, and P370L; I172N, C414S, and L560M; D371V, M610I, and G702D; D371V, K498N, M610I, and G702D; D80G, P83L, T170A, T198I, and A228T; T360S, S372P, T444M, and R578P; D50G, K66R, N94S, G417S, and E617V; or L309F, V344A, T398I, and K686E.

[0041] In some embodiments, relative to SEQ ID NO: 1, the lanosterol synthase comprises the following amino acid substitutions: R193C, D289G, N295I, S296T, N620S, and Y736F; F432S, D452G, and I536F; K85N and G158S; L197V, K282I, N314S, and P370L; I172N, C414S, L560M, and G679S; I172N, C414S, and L560M; D371V, M610I, and G702D; D371V, K498N, M610I, and G702D; D80G, P83L, T170A, T198I, and A228T; D50G, K66R. N94S, G417S, E617V, and F726L; T360S, S372P, T444M, and R578P; D50G, K66R. N94S, G417S, and E617V; and L309F, V344A, T398I, and K686E.

[0042] In some embodiments, relative to SEQ ID NO: 1, the lanosterol synthase comprises the following amino acid substitutions: D50G, K66R, N94S, G417S, E617V, and F726L; K85N and G158S; K47E, L92I, T360S, S372P, T444M, and R578P; F432S, D452G, and I536F; T360S, S372P, T444M, and R578P; L491Q, Y586F, and R660H; K85N, G158S, S515L, P526T, Q619L, and a truncation that results in deletion of the residue corresponding to position 742 in SEQ ID NO: 1; or I172N, C414S, L560M, and G679S.

[0043] In some embodiments, the lanosterol synthase comprises an amino acid substitution or deletion relative to SEQ ID NO: 1 at one or more residues corresponding to position 14, 33, 47, 50, 66, 85, 92, 94, 122, 132, 145, 158, 193, 231, 248, 249, 286, 287, 289, 295, 296, 316, 329, 360, 371, 372, 407, 417, 423, 432, 442, 444, 479, 515, 526, 529, 564, 578, 617, 619, 620, 631, 655, 702, 726, 736, 738, and/or 742 in SEQ ID NO: 1. In some embodiments, the lanosterol synthase comprises relative to SEQ ID NO: 1: R33Q, R193C, D289G, N295I, S296T. N620S, and Y736F; K47E, L92I, T360S, S372P, T444M, and R578P; D50G, K66R, N94S, G417S, E617V, and F726L; N14Y, N132S, Y145C, R193H, I286F, L316R, F432I, E442V, T444S, I479S, K631R, and T655A; E287G, K329N, E617V, and F726V; E231V, A407V, Q423L, A529T, and Y564C; V248F, D371V, and G702D; G122C, H249L, and K738M; or K85N, G158S, S515L, P526T, and Q619L, and a truncation resulting in a deletion of the residue corresponding to Q742 in SEQ ID NO: 1.

[0044] In some embodiments, the lanosterol synthase comprises a sequence that is at least 90% identical to SEQ ID NO: 3, 83-87, 89-92, 94-95, 99, 118-120, 316-319, 321-326, 329, or 331. In some embodiments, the lanosterol synthase comprises SEQ ID NO: 3, 83-87, 89-92, 94-95, 99, 118-120, 316-319, 321-326, 329, or 331. In some embodiments, the heterologous polynucleotide comprises a sequence that is at least 90% identical to SEQ ID NO: 4, 62-66, 68-71, 73-74, 78, 103-109, 111-117, 328, or 330. In some embodiments, the heterologous polynucleotide comprises the sequence of SEQ ID NO: 4, 62-66, 68-71, 73-74, 78, 103-109, 111-117, 328, or 330.

[0045] Further aspects of the disclosure relate to methods of producing mogrol, one or more mogrol precursors, and/or one or more mogrosides comprising culturing a host cell that comprises a heterologous polynucleotide encoding a lanosterol synthase, wherein the lanosterol synthase comprises an amino acid substitution or deletion relative to SEQ ID NO: 313 at one or more residues corresponding to position 64, 120, 121, 136, 226, 268, 275, 281, 300, 322, 333, 438, 502, 604, 619, 628, 656, 693, 726, 727, 728, 729, 730, and/or 731.

[0046] In some embodiments, the lanosterol synthase comprises: the amino acid G at the residue corresponding to position 64 in SEQ ID NO: 313; the amino acid V at the residue corresponding to position 120 in SEQ ID NO: 313; the amino acid S at the residue corresponding to position 121 in SEQ ID NO: 313; the amino acid V at the residue corresponding to position 136 in SEQ ID NO: 313; the amino acid I at the residue corresponding to position 226 in SEQ ID NO: 313; the amino acid S at the residue corresponding to position 268 in SEQ ID NO: 313; the amino acid I at the residue corresponding to position 275 in SEQ ID NO: 313; the amino acid A at the residue corresponding to position 281 in SEQ ID NO: 313; the amino acid G at the residue corresponding to position 300 in SEQ ID NO: 313; the amino acid G at the residue corresponding to position 322 in SEQ ID NO: 313; the amino acid A at the residue corresponding to position 333 in SEQ ID NO: 313; the amino acid E at the residue corresponding to position 438 in SEQ ID NO: 313; the amino acid L at the residue corresponding to position 502 in SEQ ID NO: 313; the amino acid N at the residue corresponding to position 604 in SEQ ID NO: 313; the amino acid S at the residue corresponding to position 619 in SEQ ID NO: 313; the amino acid E at the residue corresponding to position 628 in SEQ ID NO: 313; the amino acid T at the residue corresponding to position 656 in SEQ ID NO: 313; the amino acid G at the residue corresponding to position 693 in SEQ ID NO: 313; and/or deletion of residues corresponding to positions 726-731 in SEQ ID NO: 313.

[0047] In some embodiments, the lanosterol synthase comprises relative to SEQ ID NO: 313: P121S, A136V, S300G, V322G, K438E, F502L, K628E, and deletion of residues corresponding to positions 726-731 in SEQ ID NO: 313; K268S, T281A, F502L, T604N, A656T, and E693G; or C619S, F275I, I120V, M226I, R64G, and T333A.

[0048] In some embodiments, the lanosterol synthase comprises a sequence that is at least 90% identical to any one of SEQ ID NOs: 100-102.

[0049] In some embodiments, the lanosterol synthase comprises a sequence selected from SEQ ID NOs: 100-102.

[0050] In some embodiments, the heterologous polynucleotide encoding the lanosterol synthase comprises a sequence that is at least 90% identical to a sequence selected from SEQ ID NOs: 80-82.

[0051] In some embodiments, the heterologous polynucleotide encoding the lanosterol synthase comprises a sequence selected from SEQ ID NOs: 80-82.

[0052] In some embodiments, the host cell is capable of producing mevalonate. In some embodiments, the host cell is capable of producing at least 0.2 g/L mevalonate. In some embodiments, the host cell is capable of producing at least 0.7 g/L mevalonate. In some embodiments, the host cell is capable of producing at least 9 mg/L cucurbitadienol. In some embodiments, the host cell is capable of producing at least 1.1 fold more cucurbitadienol than a control host cell comprising SEQ ID NO: 1 and/or a control host cell comprising SEQ ID NO: 313. In some embodiments, the host cell is capable of producing at least 3 fold more cucurbitadienol than a control host cell comprising SEQ ID NO: 1 and/or a control host cell comprising SEQ ID NO: 313. In some embodiments, the host cell is capable of producing at most 200 mg/L lanosterol. In some embodiments, the host cell is capable of producing at least 5 mg/L oxidosqualene.

[0053] In some embodiments, the host cell is capable of producing more mevalonate than a control host cell that does not comprise the heterologous polynucleotide.

[0054] In some embodiments, the host cell further comprises one or more heterologous polynucleotides encoding one or more of: a UDP-glycosyltransferases (UGT) enzyme, a cucurbitadienol synthase (CDS) enzyme, a C11 hydroxylase, an epoxide hydrolase (EPH), and squalene epoxidase (SQE). In some embodiments, the UGT enzyme comprises a sequence that is at least 90% identical to SEQ ID NO: 121. In some embodiments, the CDS enzyme comprises a sequence that is at least 90% identical to any one of SEQ ID NOs: 226, SEQ ID NO: 235, SEQ ID NO: 232, and SEQ ID NO: 256. In some embodiments, the C11 hydroxylase comprises a sequence that is at least 90% identical to any one of SEQ ID NOS: 280-281, 305, and 315. In some embodiments, the EPH comprises a sequence that is at least 90% identical to any one of SEQ ID NO: 284-292 and 309-310. In some embodiments, the SQE comprises a sequence that is at least 90% identical to any one of SEQ ID NOs: 293-295 and 312. In some embodiments, the host cell further comprises a heterologous polynucleotide encoding a cytochrome P450 reductase. In some embodiments, the cytochrome P450 reductase comprises a sequence that is at least 90% identical to any one of SEQ ID NOs: 282-283 and 306-307. In some embodiments, the host cell further comprises a heterologous polynucleotide encoding a cytochrome P450 reductase with reduced activity as compared to a control cytochrome P450 reductase or a heterologous polynucleotide that reduces cytochrome P450 activity. In some embodiments, the control cytochrome P450 reductase is a wild-type P450 reductase.

[0055] In some embodiments, the host cell is a yeast cell, a plant cell, or a bacterial cell. In some embodiments, the host cell is a yeast cell. In some embodiments, the yeast cell is a Saccharomyces cerevisiae cell. In some embodiments, the yeast cell is a Yarrowia lipolytica cell. In some embodiments, the host cell is a bacterial cell. In some embodiments, the bacterial cell is an E. coli cell.

[0056] In some embodiments, the host cell further comprises a heterologous polynucleotide encoding an acetoacetyl CoA synthase. In some embodiments, the acetoacetyl CoA synthase comprises a sequence that is at least 90% identical to SEQ ID NO: 6. In some embodiments, the heterologous polynucleotide encoding the acetoacetyl CoA synthase comprises a sequence that is at least 90% identical to SEQ ID NO: 7.

[0057] In some embodiments, the mogroside is selected from mogroside I-A1 (MIA1), mogroside IE (MIE), mogroside II-A1 (MIIA1), mogroside II-A2 (MIIA2), mogroside III-A1 (MIIIA1), mogroside II-E (MIIE), mogroside III (MIII), siamenoside I, mogroside IV (MIV), mogroside IVa (MIVA), isomogroside IV, mogroside III-E (MIIIE), mogroside V (MV), mogroside VIA (MVIA), mogroside VIB (MVIB), isomogroside V, mogroside VIa1 (MVIa1), and/or mogroside VI (MVI).

[0058] Each of the limitations of the invention can encompass various embodiments of the invention. It is, therefore, anticipated that each of the limitations of the invention involving any one element or combinations of elements can be included in each aspect of the invention. This invention is not limited in its application to the details of construction and the arrangement of components set forth in the following description or illustrated in the drawings. The invention is capable of other embodiments and of being practiced or of being carried out in various ways.

### BRIEF DESCRIPTION OF DRAWINGS

[0059] The accompanying drawings are not intended to be drawn to scale. The drawings are illustrative only and are not required for enablement of the disclosure. For purposes of clarity, not every component may be labeled in every drawing. In the drawings:

[0060] FIGS. 1A-1F include schematic overviews of the mevalonate pathway and putative mogrol biosynthesis pathways. SQS indicates squalene synthase, EPD indicates epoxidase, P450 indicates C11 hydroxylase, EPH indicates epoxide hydrolase, and CDS indicates cucurbitadienol synthase. FIGS. 1A-1B provide a non-limiting example of how the mevalonate pathway provides precursors for mogrol biosynthesis. FIG. 1B shows a sterol biosynthesis pathway and is a continuation of FIG. 1A. FIG. 1C and FIG. 1D show how the mevalonate pathway products feed into putative mogrol biosynthesis pathways. FIG. 1E shows non-limiting examples of primary UGT activity. FIG. 1F shows non-limiting examples of secondary UGT activity.

[0061] FIG. 2 is a graph depicting mevalonate production by Yarrowia strains comprising a lanosterol synthase.

[0062] FIG. 3 is a graph depicting cucurbitadienol production by strains comprising a lanosterol synthase (erg7 allele). Strain 870688 comprising SEQ ID NO: 1 was used as a control.

[0063] FIG. 4 is a graph depicting cucurbitadienol, ergosterol, lanosterol, and mevalonate production by strains comprising a lanosterol synthase (erg7 allele). Strain 887779 comprising SEQ ID NO: 1 was used as a control.

[0064] FIG. 5 is a graph depicting oxidosqualene production in lanosterol synthase temperature sensitive mutant (erg7 mutant) strains at 30° C. and 35° C. Three lanosterol synthase mutant strains 756247, 756248 and 756249 comprising SEQ ID NOs: 100-102, respectively, were tested and the parent BY4742 Saccharomyces cerevisiae strain was included as the negative control.

[0065] FIG. 6 is a graph depicting production of ergosterol, ethanol, and mevalonate and consumption of glucose in lanosterol synthase temperature sensitive mutant (erg7 mutant) strains at 30° C. Three lanosterol synthase mutant strains 756247, 756248 and 756249 comprising SEQ ID NOs: 100-102, respectively, were tested and the parent BY4742 Saccharomyces cerevisiae strain was included as the negative control.

[0066] FIG. 7 is a graph depicting production of ergosterol, ethanol, and mevalonate and consumption of glucose in lanosterol synthase temperature sensitive mutant (erg7 mutant) strains at 35° C. Three lanosterol synthase mutant strains 756247, 756248 and 756249 comprising SEQ ID NOs: 100-102, respectively, were tested and the parent BY4742 Saccharomyces cerevisiae strain was included as the negative control.

### DETAILED DESCRIPTION

[0067] Mogrosides are widely used as natural sweeteners, for example, in beverages. However, de novo synthesis and mogroside extraction from natural sources often involve high production costs and low yield. This disclosure provides host cells that are engineered to efficiently produce mogrol (or 11, 24, 25-trihydroxy cucurbitadienol), mogrosides, and precursors thereof. Methods include use of host cells which feature a variant of lanosterol synthase enzyme (e.g., a mutant with decreased but not abolished enzymatic activity). Examples 1 and 3-4 describe the identification and functional characterization of lanosterol synthases that can be used to increase production of mogrol precursors, mogrol, and mogrosides. In some embodiments, the host cell also features the heterologous expression of (e.g., the increased expression, level and/or activity of) any of various enzymes involved in synthesis of mogrol, mogrol precursors, mogroside precursors, and mogrosides, including but not limited to: cucurbitadienol synthase (CDS) enzymes, UDP-glycosyltransferase (UGT) enzymes, C11 hydroxylase enzymes, epoxide hydrolase (EPH) enzymes, squalene epoxidase (SQE) enzymes, or combinations thereof. In some embodiments, wherein 11-oxo mogrol is not a desired product, the level, expression and/or activity of a cytochrome P450 reductase, which is involved in synthesis of 11-oxo mogrol, is decreased in the host cell.

[0068] In some embodiments, the host cell further comprises a heterologous polynucleotide encoding an acetoacetyl CoA synthase (e.g., an acetoacetyl CoA synthase comprising the amino acid sequence provided in SEQ ID NO: 6).

### Synthesis of Mogrol and Mogrosides

[0069] FIGS. 1A-1B show how the mevalonate pathway provides precursors for mogrol synthesis. First, two acetyl-CoA molecules are condensed to form acetoacetyl-CoA, which is then condensed to form 3-hydroxy-3-methyl-glutaryl-CoA (HMG-COA). Then, HMG-COA is reduced to form mevalonate. Mevalonate is subsequently, via multiple enzymatic steps, converted into isopentenyl pyrophosphate (IPP) and dimethylallyl pyrophosphate (DMAPP). FIGS. 1C-1D show putative mogrol synthesis pathways. An early step involves conversion of squalene to 2,3-oxidosqualene. As shown in FIG. 1C, 2,3-oxidosqualene can be first cyclized to cucurbitadienol followed by epoxidation to form 24,25-epoxycucurbitadienol, or 2,3-oxidosqualene can be epoxidized to 2,3,22,23-dioxidosqualene and then cyclized to 24,25-epoxycucurbitadienol. Next, the 24,25-epoxycucurbitadienol can be converted to mogrol (an aglycone of mogrosides) following epoxide hydrolysis and then oxidation, or oxidation and then epoxide hydrolysis. As shown in FIG. 1D, 2,3-oxidosqualene can be first cyclized to cucurbitadienol, which is then converted to 11-hydroxycucurbitadienol by a cytochrome P450 C11 hydroxylase. Then, a cytochrome P450 C11 hydroxylase may convert 11-hydroxycucurbitadienol to 11-hydroxy-24,25-epoxycucurbitadienol. 11-hydroxy-24,25-epoxycucurbitadienol may be converted to mogrol by epoxide hydrolase. C11 hydroxylases act in conjunction with cytochrome P450 reductases (not shown in FIGS. 1C-1D).

[0070] Mogrol can be distinguished from other cucurbitane triterpenoids by oxygenations at C3, C11, C24, and C25. Glycosylation of mogrol, for example at C3 and/or C24, leads to the formation of mogrosides.

[0071] Mogrol precursors include but are not limited to acetyl-CoA, acetoacetyl-CoA, HMG-CoA, mevalonate, mevalonate-5-phosphate, mevalonate pyrophosphate, isopentenyl pyrophosphate (IPP), dimethylallyl pyrophosphate (DMAPP), geranyl pyrophosphate (GPP), farnesyl diphosphate (FPP), squalene, 2-3-oxidosqualene, 2,3,22,23-dioxidosqualene, cucurbitadienol, 24, 25-expoxycucurbitadienol, 11-hydroxycucurbitadienol, 11-hydroxy-24,25-epoxycucurbitadienol, 11-hydroxy-cucurbitadienol, 11-oxo-cucurbitadienol, and 24,25-dihydroxycucurbitadienol. The term “dioxidosqualene” may be used to refer to 2,3,22,23-diepoxy squalene or 2,3,22,23-dioxido squalene. The term “2,3-epoxysqualene” may be used interchangeably with the term “2-3-oxidosqualene.” As used in this application, mogroside precursors include mogrol precursors, mogrol and mogrosides.

[0072] Examples of mogrosides include, but are not limited to, mogroside I-A1 (MIA1), mogroside IE (MIE or MIE), mogroside II-A1 (MIIA1 or M2A1), mogroside II-A2 (MIIA2 or M2A2), mogroside III-A1 (MIIIA1 or M3A1), mogroside II-E (MIIE or M2E), mogroside III (MIII or M3), siamenoside I, mogroside IV (MIV or M4), mogroside IVa (MIVA or M4A), isomogroside IV, mogroside III-E (MIIIE or M3E), mogroside V (MV or M5), mogroside VIA (MVIA), mogroside VIB (MVIB), isomogroside V, mogroside VIa1 (MVIa1), and mogroside VI (MVI or M6). In some embodiments, the mogroside produced is siamenoside I, which may be referred to as Siam. In some embodiments, the mogroside produced is MIIIE. Unless otherwise noted, when used in the plural, the terms “M1s”, “MIs”, “M2s”, “MIIs”, “M3s”, “MIIIs”, “M4s”, “MIVs”, “MVs”, “M5s”, “M6s”, and “MVIs” each refer to a class of mogrosides. As a non-limiting example, M2s or MIIs may include MIIA1, MIIA, MIIA2, and/or MIIE.

[0073] In other embodiments, a mogroside is a compound of Formula 1:

[chemical structure]

[0074] In some embodiments, the methods described in this application may be used to produce any of the compounds described in and incorporated by reference from US 2019/0071705 (which granted as U.S. Pat. No. 11,060,124), including compounds 1-20 as disclosed in US 2019/0071705. In some embodiments, the methods described in this application may be used to produce variants of any of the compounds described in and incorporated by reference from US 2019/0071705, including variants of compounds 1-20 as disclosed in US 2019/0071705. For example, a variant of a compound described in US 2019/0071705 can comprise a substitution of one or more alpha-glucosyl linkages in a compound described in US 2019/0071705 with one or more beta-glucosyl linkages. In some embodiments, a variant of a compound described in US 2019/0071705 comprises a substitution of one or more beta-glucosyl linkages in a compound described in US 2019/0071705 with one or more alpha-glucosyl linkages. In some embodiments, a variant of a compound described in US 2019/0071705 is a compound of Formula 1 shown above.

[0075] In some embodiments, a host cell comprising one or more proteins described herein (e.g., a lanosterol synthase, an acetoacetyl CoA synthase, a cytochrome b5 (CB5), a UDP-glycosyltransferase (UGT) enzyme, a cucurbitadienol synthase (CDS) enzyme, a C11 hydroxylase enzyme, a cytochrome P450 reductase enzyme, an epoxide hydrolase enzyme (EPH), a squalene epoxidase enzyme (SQE) and/or any proteins associated with the disclosure) is capable of producing at least 0.005 mg/L, at least 0.01 mg/L, at least 0.02 mg/L, at least 0.03 mg/L, at least 0.04 mg/L, at least 0.05 mg/L, at least 0.06 mg/L, at least 0.07 mg/L, at least 0.08 mg/L, at least 0.09 mg/L, at least 0.1 mg/L, at least 0.2 mg/L, at least 0.3 mg/L, at least 0.4 mg/L, at least 0.5 mg/L, at least 0.6 mg/L, at least 0.7 mg/L, at least 0.8 mg/L, at least 0.9 mg/L, at least 1 mg/L, at least 2 mg/L, at least 3 mg/L, at least 4 mg/L, at least 5 mg/L, at least 6 mg/L, at least 7 mg/L, at least 8 mg/L, at least 9 mg/L, at least 10 mg/L, at least 11 mg/L, at least 12 mg/L, at least 13 mg/L, at least 14 mg/L, at least 15 mg/L, at least 16 mg/L, at least 17 mg/L, at least 18 mg/L, at least 19 mg/L, at least 20 mg/L, at least 21 mg/L, at least 22 mg/L, at least 23 mg/L, at least 24 mg/L, at least 25 mg/L, at least 26 mg/L, at least 27 mg/L, at least 28 mg/L, at least 29 mg/L, at least 30 mg/L, at least 31 mg/L, at least 32 mg/L, at least 33 mg/L, at least 34 mg/L, at least 35 mg/L, at least 36 mg/L, at least 37 mg/L, at least 38 mg/L, at least 39 mg/L, at least 40 mg/L, at least 41 mg/L, at least 42 mg/L, at least 43 mg/L, at least 44 mg/L, at least 45 mg/L, at least 46 mg/L, at least 47 mg/L, at least 48 mg/L, at least 49 mg/L, at least 50 mg/L, at least 51 mg/L, at least 52 mg/L, at least 53 mg/L, at least 54 mg/L, at least 55 mg/L, at least 56 mg/L, at least 57 mg/L, at least 58 mg/L, at least 59 mg/L, at least 60 mg/L, at least 61 mg/L, at least 62 mg/L, at least 63 mg/L, at least 64 mg/L, at least 65 mg/L, at least 66 mg/L, at least 67 mg/L, at least 68 mg/L, at least 69 mg/L, at least 70 mg/L, at least 75 mg/L, at least 80 mg/L, at least 85 mg/L, at least 90 mg/L, at least 95 mg/L, at least 100 mg/L, at least 125 mg/L, at least 150 mg/L, at least 175 mg/L, at least 200 mg/L, at least 225 mg/L, at least 250 mg/L, at least 275 mg/L, at least 300 mg/L, at least 325 mg/L, at least 350 mg/L, at least 375 mg/L, at least 400 mg/L, at least 425 mg/L, at least 450 mg/L, at least 475 mg/L, at least 500 mg/L, at least 1,000 mg/L, at least 2,000 mg/L, at least 3,000 mg/L, at least 4,000 mg/L, at least 5,000 mg/L, at least 6,000 mg/L, at least 7,000 mg/L, at least 8,000 mg/L, at least 9,000 mg/L, at least 10,000 mg/L, at least 11 g/L, at least 12 g/L, at least 13 g/L, at least 14 g/L, at least 15 g/L, at least 16 g/L, at least 17 g/L, at least 18 g/L, at least 19 g/L, at least 20 g/L, at least 21 g/L, at least 22 g/L, at least 23 g/L, at least 24 g/L, at least 25 g/L, at least 26 g/L, at least 27 g/L, at least 28 g/L, at least 29 g/L, at least 30 g/L, at least 31 g/L, at least 32 g/L, at least 33 g/L, at least 34 g/L, at least 35 g/L, at least 36 g/L, at least 37 g/L, at least 38 g/L, at least 39 g/L, at least 40 g/L, at least 41 g/L, at least 42 g/L, at least 43 g/L, at least 44 g/L, at least 45 g/L, at least 46 g/L, at least 47 g/L, at least 48 g/L, at least 49 g/L, at least 50 g/L, at least 51 g/L, at least 52 g/L, at least 53 g/L, at least 54 g/L, at least 55 g/L, at least 56 g/L, at least 57 g/L, at least 58 g/L, at least 59 g/L, at least 60 g/L, at least 61 g/L, at least 62 g/L, at least 63 g/L, at least 64 g/L, at least 65 g/L, at least 66 g/L, at least 67 g/L, at least 68 g/L, at least 69 g/L, at least 70 g/L, at least 75 g/L, at least 80 g/L, at least 85 g/L, at least 90 g/L, at least 95 g/L, at least 100 g/L, at least 125 g/L, at least 150 g/L, at least 175 g/L, at least 200 g/L, at least 225 g/L, at least 250 g/L, at least 275 g/L, at least 300 g/L, at least 325 g/L, at least 350 g/L, at least 375 g/L, at least 400 g/L, at least 425 g/L, at least 450 g/L, at least 475 g/L, at least 500 g/L, at least 1,000 g/L, at least 2,000 g/L, at least 3,000 g/L, at least 4,000 g/L, at least 5,000 g/L, at least 6,000 g/L, at least 7,000 g/L, at least 8,000 g/L, at least 9,000 g/L, or at least 10,000 g/L of one or more mogrosides and/or mogroside precursors. In some embodiments, the mogroside is mogroside I-A1 (MIA1), mogroside IE (MIE or MIE), mogroside II-A1 (MIIA1 or M2A1), mogroside II-A2 (MIIA2 or M2A2), mogroside III-A1 (MIIIA1 or M3A1), mogroside II-E (MIIE or M2E), mogroside III (MIII or M3), siamenoside I, mogroside IV (MIV or M4), mogroside IVa (MIVA or M4A), isomogroside IV, mogroside III-E (MIIIE or M3E), mogroside V (MV or M5), mogroside VIA (MVIA), mogroside VIB (MVIB), isomogroside V, mogroside VIa1 (MVIa1), or mogroside VI (MVI or M6). In some embodiments, the mogroside precursor is oxidosqualene. In some embodiments, the mogroside precursor is cucurbitadienol. In some embodiments, the mogrol or mogroside precursor is mevalonate.

### Lanosterol Synthases

[0076] Aspects of the present disclosure provide lanosterol synthases, which may be useful, for production of various compounds, including for example, mogrol precursors, mogrol, and/or mogrosides. As used in this disclosure, a lanosterol synthase is an enzyme that is capable of catalyzing cyclization of 2-3-oxidosqualene to produce lanosterol. In some embodiments, a lanosterol synthase disclosed herein is a hypomorph of lanosterol synthase, e.g., a variant of lanosterol synthase that has reduced (e.g., decreased but not abolished) lanosterol synthase expression, level and/or activity. Without being bound by any particular theory, the present disclosure suggests that complete inactivation of lanosterol synthase is lethal in yeast, as lanosterol synthase may be needed to produce a hydrophobic component of the cell membrane important for maintaining the integrity of the cell. In some embodiments, a lanosterol synthase disclosed herein is useful for mogrol and/or mogroside production, and/or production of their precursors, as reduction in lanosterol synthase activity increases flux through the mevalonate pathway and/or reduces competition for oxidosqualene. Structurally, a lanosterol synthase may comprise the catalytic motif DCTAE (SEQ ID NO: 5). See e.g., Corey et al. PNAS 1994 Mar. 15; 91(6):2211-5 and Shi et al. 1994 Jul. 19; 91(15):7370-4. In some embodiments, in a host cell in which lanosterol synthase expression, level or activity is decreased, the cell retains enough functional lanosterol synthase to maintain the integrity of its cell and remain viable, but a decreased proportion of 2-3-oxidosqualene is converted to lanosterol (e.g., as compared to a similar cell comprising a wild-type ERG7). In some aspects, the present disclosure pertains to a host cell which comprises a mevalonate pathway (or a portion thereof, wherein a portion of a mevalonate pathway comprises at least one enzyme of a mevalonate pathway, including but not limited to: acetoacetyl COA synthase, ERG10, ERG13, HMG, ERG12, ERG8, ERG19, IDI, ERG20, ERG9, a UDP-glycosyltransferases (UGT) enzyme (e.g., a primary or secondary UGT), a cucurbitadienol synthase (CDS) enzyme, a C11 hydroxylase, an epoxide hydrolase (EPH), and squalene epoxidase (SQE), further comprising a variant of lanosterol synthase described herein.

[0077] As a non-limiting example, a lanosterol synthase may be ERG7 and may comprise the amino acid sequence:

(SEQ ID NO: 1)
MGIHESVSKQFAKNGHSKYRSDRYGLPKTDLRRWTFHASDLGAQWWKYDD
TTPLEELEKRATDYVKYSLELPGYAPVTLDSKPVKNAYEAALKNWHLFAS
LQDPDSGAWQSEYDGPQFMSIGYVTACYFGGNEIPTPVKTEMIRYIVNTA
HPVDGGWGLHKEDKSTCFGTSINYVVLRLLGLSRDHPVCVKARKTLLTKF
GGAINNPHWGKTWLSILNLYKWEGVNPAPGELWLLPYFVPVHPGRWWVHT
RWIYLAMGYLEAAEAQCELTPLLEELRDEIYKKPYSEIDFSKHCNSISGV
DLYYPHTGLLKFGNALLRRYRKFRPQWIKEKVKEEIYNLCLREVSNTRHL
CLAPVNNAMTSIVMYLHEGPDSANYKKIAARWPEFLSLNPSGMFMNGTNG
LQVWDTAFAVQYACVCGFAELPQYQKTIRAAFDFLDRSQINEPTEENSYR
DDRVGGWPFSTKTQGYPVSDCTAEALKAIIMVQNTPGYEDLKKQVSDKRK
HTAIDLLLGMQNVGSFEPGSFASYEPIRASSMLEKINPAEVFGNIMVEYP
YVECTDSVVLGLSYFRKYHDYRNEDVDRAISAAIGYIIREQQPDGGFFGS
WGVCYCYAHMFAMEALETQNLNYNNCSTVQKACDFLAGYQEADGGWAEDF
KSCETQMYVRGPHSLVVPTAMALLSLMSGRYPQEDKIHAAARFLMSKQMS
NGEWLKEEMEGVFNHTCAIEYPNYRFYFVMKALGLYFKGYCQ.

[0078] SEQ ID NO: 1 may be encoded by the nucleotide sequence:

(SEQ ID NO: 2)
ATGGGAATCCACGAAAGTGTGTCGAAACAGTTTGCGAAAAACGGACATTC
CAAGTACCGCAGCGACCGATACGGCTTACCTAAGACGGATCTGCGACGAT
GGACGTTCCACGCGTCCGATCTGGGGGCGCAATGGTGGAAGTATGACGAT
ACCACACCGCTGGAAGAGCTGGAAAAGAGGGCTACCGACTACGTCAAATA
CTCGCTGGAGCTGCCGGGATACGCGCCCGTGACTCTGGACTCCAAGCCCG
TGAAAAATGCCTACGAAGCGGCTCTCAAAAACTGGCATCTGTTTGCGTCG
CTGCAAGACCCCGACTCCGGCGCATGGCAGTCGGAATACGACGGACCGCA
GTTCATGTCGATCGGTTATGTGACGGCGTGCTACTTTGGCGGCAACGAGA
TCCCCACGCCGGTCAAAACCGAAATGATCAGATACATTGTCAACACAGCC
CACCCAGTTGACGGAGGCTGGGGCCTTCACAAAGAAGACAAGAGCACCTG
TTTCGGTACCAGCATCAACTACGTGGTCCTGCGACTACTGGGCCTGTCAC
GGGATCATCCGGTCTGCGTCAAGGCGCGCAAAACGCTGCTCACCAAGTTT
GGCGGCGCCATCAACAACCCCCATTGGGGCAAGACCTGGCTGTCGATTCT
CAATCTCTACAAATGGGAGGGTGTGAATCCGGCCCCTGGCGAGCTCTGGC
TGTTGCCCTACTTTGTTCCTGTTCATCCGGGCCGATGGTGGGTCCATACC
CGGTGGATCTACCTTGCCATGGGCTATCTGGAGGCTGCGGAGGCCCAATG
CGAACTCACTCCGTTGCTGGAGGAGCTCCGAGACGAAATCTACAAAAAGC
CCTACTCGGAGATTGATTTCTCCAAACATTGCAACTCCATCTCCGGAGTC
GACCTCTACTATCCCCACACCGGCCTTTTGAAGTTTGGCAACGCGCTTCT
CCGACGATACCGCAAGTTCAGACCGCAGTGGATCAAAGAAAAGGTCAAGG
AGGAAATTTACAACTTGTGCCTTCGAGAGGTTTCCAACACACGACACTTG
TGTCTCGCTCCCGTCAACAATGCCATGACCTCCATTGTCATGTATCTCCA
TGAGGGGCCCGATTCGGCGAATTACAAAAAGATTGCGGCCCGATGGCCCG
AATTTCTGTCTCTGAATCCGTCGGGAATGTTTATGAACGGCACCAACGGT
CTGCAGGTCTGGGATACTGCGTTTGCCGTGCAATACGCGTGTGTTTGTGG
CTTTGCCGAACTTCCCCAGTACCAGAAGACGATCCGAGCGGCGTTTGATT
TTCTCGATCGGTCCCAGATCAACGAGCCGACGGAGGAAAATTCCTATCGA
GACGACCGCGTCGGAGGATGGCCCTTTAGTACCAAGACCCAGGGGTATCC
AGTCTCCGACTGTACTGCCGAGGCTCTCAAGGCCATCATCATGGTCCAGA
ATACGCCTGGATACGAGGATCTGAAGAAACAAGTGTCTGACAAGCGGAAA
CACACTGCCATCGATCTACTTTTGGGAATGCAGAACGTGGGCTCGTTTGA
ACCGGGCTCTTTCGCCTCCTATGAGCCTATCCGGGCGTCGTCCATGCTGG
AGAAGATCAATCCGGCCGAGGTGTTTGGAAACATCATGGTGGAGTATCCG
TACGTGGAATGCACTGATTCTGTTGTTCTGGGTCTGTCCTACTTTCGAAA
GTACCACGATTACCGCAACGAAGACGTGGACCGAGCCATCTCTGCTGCCA
TTGGATACATTATTCGAGAGCAGCAGCCTGACGGCGGCTTCTTTGGCTCC
TGGGGCGTGTGCTACTGCTACGCTCACATGTTTGCCATGGAGGCTCTGGA
GACGCAGAATCTCAACTATAACAACTGTTCCACGGTTCAAAAGGCGTGCG
ACTTTCTGGCGGGCTACCAGGAAGCAGATGGAGGCTGGGCCGAGGACTTT
AAGTCGTGCGAGACTCAGATGTACGTGCGCGGACCCCATTCGCTGGTCGT
GCCTACTGCCATGGCCCTGTTGAGTTTGATGAGTGGTCGGTATCCCCAGG
AGGACAAGATTCATGCTGCGGCCCGGTTTCTCATGAGCAAGCAGATGAGC
AACGGTGAGTGGCTCAAGGAGGAGATGGAGGGGGTGTTTAACCATACTTG
TGCCATTGAGTATCCCAACTACCGGTTTTATTTTGTCATGAAGGCTTTGG
GGTTGTATTTCAAGGGATATTGCCAGTGA.

[0079] In some embodiments, a lanosterol synthase comprises the amino acid sequence:

(SEQ ID NO: 3)
MGIHESVSKQFAKNGHSKYRSDRYGLPKTDLRRWTFHASDLGAQWWKYDG
TTPLEELEKRATDYVRYSLELPGYAPVTLDSKPVKNAYEAALKSWHLFAS
LQDPDSGAWQSEYDGPQFMSIGYVTACYFGGNEIPTPVKTEMIRYIVNTA
HPVDGGWGLHKEDKSTCFGTSINYVVLRLLGLSRDHPVCVKARKTLLTKF
GGAINNPHWGKTWLSILNLYKWEGVNPAPGELWLLPYFVPVHPGRWWVHT
RWIYLAMGYLEAAEAQCELTPLLEELRDEIYKKPYSEIDFSKHCNSISGV
DLYYPHTGLLKFGNALLRRYRKFRPQWIKEKVKEEIYNLCLREVSNTRHL
CLAPVNNAMTSIVMYLHEGPDSANYKKIAARWPEFLSLNPSGMFMNGTNG
LQVWDTAFAVQYACVCSFAELPQYQKTIRAAFDFLDRSQINEPTEENSYR
DDRVGGWPFSTKTQGYPVSDCTAEALKAIIMVQNTPGYEDLKKQVSDKRK
HTAIDLLLGMQNVGSFEPGSFASYEPIRASSMLEKINPAEVFGNIMVEYP
YVECTDSVVLGLSYFRKYHDYRNEDVDRAISAAIGYIIREQQPDGGFFGS
WGVCYCYAHMFAMEALVTQNLNYNNCSTVQKACDFLAGYQEADGGWAEDF
KSCETQMYVRGPHSLVVPTAMALLSLMSGRYPQEDKIHAAARFLMSKQMS
NGEWLKEEMEGVFNHTCAIEYPNYRLYFVMKALGLYFKGYCQ.

[0080] In some embodiments, a lanosterol synthase comprising SEQ ID NO: 3 is encoded by the nucleotide sequence:

(SEQ ID NO: 4)
ATGGGAATCCACGAAAGTGTGTCGAAACAGTTTGCGAAAAACGGACATTC
CAAGTACCGCAGCGACCGATACGGCTTACCTAAGACGGATCTGCGACGAT
GGACGTTCCACGCGTCCGATCTGGGGGCGCAATGGTGGAAGTATGACGGT
ACCACACCGCTGGAAGAGCTGGAAAAGAGGGCTACCGACTACGTCAGATA
CTCGCTGGAGCTGCCGGGATACGCGCCCGTGACTCTGGACTCCAAGCCCG
TGAAAAATGCCTACGAAGCGGCTCTCAAAAGCTGGCATCTGTTTGCGTCG
CTGCAAGACCCCGACTCCGGCGCATGGCAGTCGGAATACGACGGACCGCA
GTTCATGTCGATCGGTTATGTGACGGCGTGCTACTTTGGCGGCAACGAGA
TCCCCACGCCGGTCAAAACCGAAATGATCAGATACATTGTCAACACAGCC
CACCCAGTTGACGGAGGCTGGGGCCTTCACAAAGAAGACAAGAGCACCTG
TTTCGGTACCAGCATCAACTACGTGGTCCTGCGACTACTGGGCCTGTCAC
GGGATCATCCGGTCTGCGTCAAGGCGCGCAAAACGCTGCTCACCAAGTTT
GGCGGCGCCATCAACAACCCCCATTGGGGCAAGACCTGGCTGTCGATTCT
CAATCTCTACAAATGGGAGGGTGTGAATCCGGCCCCTGGCGAGCTCTGGC
TGTTGCCCTACTTTGTTCCTGTTCATCCGGGCCGATGGTGGGTCCATACC
CGGTGGATCTACCTTGCCATGGGCTATCTGGAGGCTGCGGAGGCCCAATG
CGAACTCACTCCGTTGCTGGAGGAGCTCCGAGACGAAATCTACAAAAAGC
CCTACTCGGAGATTGATTTCTCCAAACATTGCAACTCCATCTCCGGAGTC
GACCTCTACTATCCCCACACCGGCCTTTTGAAGTTTGGCAACGCGCTTCT
CCGACGATACCGCAAGTTCAGACCGCAGTGGATCAAAGAAAAGGTCAAGG
AGGAAATTTACAACTTGTGCCTTCGAGAGGTTTCCAACACACGACACTTG
TGTCTCGCTCCCGTCAACAATGCCATGACCTCCATTGTCATGTATCTCCA
TGAGGGGCCCGATTCGGCGAATTACAAAAAGATTGCGGCCCGATGGCCCG
AATTTCTGTCTCTGAATCCGTCGGGAATGTTTATGAACGGCACCAACGGT
CTGCAGGTCTGGGATACTGCGTTTGCCGTGCAATACGCGTGTGTTTGTAG
CTTTGCCGAACTTCCCCAGTACCAGAAGACGATCCGAGCGGCGTTTGATT
TTCTCGATCGGTCCCAGATCAACGAGCCGACGGAGGAAAATTCCTATCGA
GACGACCGCGTCGGAGGATGGCCCTTTAGTACCAAGACCCAGGGGTATCC
AGTCTCCGACTGTACTGCCGAGGCTCTCAAGGCCATCATCATGGTCCAGA
ATACGCCTGGATACGAGGATCTGAAGAAACAAGTGTCTGACAAGCGGAAA
CACACTGCCATCGATCTACTTTTGGGAATGCAGAACGTGGGCTCGTTTGA
ACCGGGCTCTTTCGCCTCCTATGAGCCTATCCGGGCGTCGTCCATGCTGG
AGAAGATCAATCCGGCCGAGGTGTTTGGAAACATCATGGTGGAGTATCCG
TACGTGGAATGCACTGATTCTGTTGTTCTGGGTCTGTCCTACTTTCGAAA
GTACCACGATTACCGCAACGAAGACGTGGACCGAGCCATCTCTGCTGCCA
TCGGATACATTATTCGAGAGCAGCAGCCTGACGGTGGCTTCTTTGGCTCC
TGGGGCGTGTGCTACTGCTACGCTCACATGTTTGCCATGGAGGCTCTGGT
GACGCAGAATCTCAACTATAACAACTGTTCCACGGTTCAAAAGGCGTGCG
ACTTTCTGGCGGGCTACCAGGAAGCAGATGGAGGCTGGGCCGAGGACTTT
AAGTCGTGCGAGACTCAGATGTACGTGCGCGGACCCCATTCGCTGGTCGT
GCCTACTGCCATGGCCCTGTTGAGTTTGATGAGTGGTCGGTATCCCCAGG
AGGACAAGATTCATGCTGCGGCCCGGTTTCTCATGAGCAAGCAGATGAGC
AACGGTGAGTGGCTCAAGGAGGAGATGGAGGGGGTGTTTAACCATACTTG
TGCCATTGAGTATCCCAACTACCGGTTATATTTTGTCATGAAGGCTTTGG
GGTTGTATTTCAAGGGATATTGCCAGTGA.

[0081] In some embodiments, a lanosterol synthase of the present disclosure comprises a sequence (e.g., nucleic acid or amino acid sequence) that is at least 5%, at least 10%, at least 15%, at least 20%, at least 25%, at least 30%, at least 35%, at least 40%, at least 45%, at least 50%, at least 55%, at least 60%, at least 65%, at least 70%, at least 71%, at least 72%, at least 73%, at least 74%, at least 75%, at least 76%, at least 77%, at least 78%, at least 79%, at least 80%, at least 81%, at least 82%, at least 83%, at least 84%, at least 85%, at least 86%, at least 87%, at least 88%, at least 89%, at least 90%, at least 91%, at least 92%, at least 93%, at least 94%, at least 95%, at least 96%, at least 97%, at least 98%, at least 99%, or 100% identical, including all values in between, to any one of SEQ ID NOs: 1-4, 61-66, 68-71, 73-74, 78-87, 89-92, 94-95, 99-109, 111-120, 304, 313, 316-319, 321-326, and 328-331, any lanosterol synthase in Tables 11 and 14, or any lanosterol synthase sequence disclosed in this application or known in the art.

[0082] In some embodiments, a lanosterol synthase comprises at least 1, at least 2, at least 3, at least 4, at least 5, at least 6, at least 7, at least 8, at least 9, at least 10, at least 11, at least 12, at least 13, at least 14, at least 15, at least 16, at least 17, at least 18, at least 19, at least 20, at least 21, at least 22, at least 23, at least 24, at least 25, at least 26, at least 27, at least 28, at least 29, at least 30, at least 31, at least 32, at least 33, at least 34, at least 35, at least 36, at least 37, at least 38, at least 39, at least 40, at least 41, at least 42, at least 43, at least 44, at least 45, at least 46, at least 47, at least 48, at least 49, at least 50, at least 51, at least 52, at least 53, at least 54, at least 55, at least 56, at least 57, at least 58, at least 59, at least 60, at least 61, at least 62, at least 63, at least 64, at least 65, at least 66, at least 67, at least 68, at least 69, at least 70, at least 71, at least 72, at least 73, at least 74, at least 75, at least 76, at least 77, at least 78, at least 79, at least 80, at least 81, at least 82, at least 83, at least 84, at least 85, at least 86, at least 87, at least 88, at least 89, at least 90, at least 91, at least 92, at least 93, at least 94, at least 95, at least 96, at least 97, at least 98, at least 99, or at least 100 amino acid changes relative to SEQ ID NO: 1 or 313.

[0083] In some embodiments, a lanosterol synthase comprises at most 1, at most 2, at most 3, at most 4, at most 5, at most 6, at most 7, at most 8, at most 9, at most 10, at most 11, at most 12, at most 13, at most 14, at most 15, at most 16, at most 17, at most 18, at most 19, at most 20, at most 21, at most 22, at most 23, at most 24, at most 25, at most 26, at most 27, at most 28, at most 29, at most 30, at most 31, at most 32, at most 33, at most 34, at most 35, at most 36, at most 37, at most 38, at most 39, at most 40, at most 41, at most 42, at most 43, at most 44, at most 45, at most 46, at most 47, at most 48, at most 49, at most 50, at most 51, at most 52, at most 53, at most 54, at most 55, at most 56, at most 57, at most 58, at most 59, at most 60, at most 61, at most 62, at most 63, at most 64, at most 65, at most 66, at most 67, at most 68, at most 69, at most 70, at most 71, at most 72, at most 73, at most 74, at most 75, at most 76, at most 77, at most 78, at most 79, at most 80, at most 81, at most 82, at most 83, at most 84, at most 85, at most 86, at most 87, at most 88, at most 89, at most 90, at most 91, at most 92, at most 93, at most 94, at most 95, at most 96, at most 97, at most 98, at most 99, or at most 100 amino acid changes relative to SEQ ID NO: 1 or 313.

[0084] In some embodiments, a lanosterol synthase comprises between 1-5, between 1-10, between 1-15, between 1-20, between 1-25, between 1-30, between 1-35, between 1-40, between 1-45, between 1-50, between 5-10, between 5-20, between 5-30, between 5-40, between 5-50, between 5-60, between 5-70, between 5-80, between 5-90, between 5-100, between 10-20, between 10-30, between 10-40, between 10-50, between 10-60, between 10-70, between 10-80, between 10-90, or between 10-100 amino acid changes, including all values in between, relative to SEQ ID NO: 1 or 313.

[0085] In some embodiments, a lanosterol synthase comprises an amino acid change at one or more positions selected from position 1, 2, 3, 4, 5, 6, 7, 8, 9, 10, 11, 12, 13, 14, 15, 16, 17, 18, 19, 20, 21, 22, 23, 24, 25, 26, 27, 28, 29, 30, 31, 32, 33, 34, 35, 36, 37, 38, 39, 40, 41, 42, 43, 44, 45, 46, 47, 48, 49, 50, 51, 52, 53, 54, 55, 56, 57, 58, 59, 60, 61, 62, 63, 64, 65, 66, 67, 68, 69, 70, 71, 72, 73, 74, 75, 76, 77, 78, 79, 80, 81, 82, 83, 84, 85, 86, 87, 88, 89, 90, 91, 92, 93, 94, 95, 96, 97, 98, 99, 100, 101, 102, 103, 104, 105, 106, 107, 108, 109, 110, 111, 112, 113, 114, 115, 116, 117, 118, 119, 120, 121, 122, 123, 124, 125, 126, 127, 128, 129, 130, 131, 132, 133, 134, 135, 136, 137, 138, 139, 140, 141, 142, 143, 144, 145, 146, 147, 148, 149, 150, 151, 152, 153, 154, 155, 156, 157, 158, 159, 160, 161, 162, 163, 164, 165, 166, 167, 168, 169, 170, 171, 172, 173, 174, 175, 176, 177, 178, 179, 180, 181, 182, 183, 184, 185, 186, 187, 188, 189, 190, 191, 192, 193, 194, 195, 196, 197, 198, 199, 200, 201, 202, 203, 204, 205, 206, 207, 208, 209, 210, 211, 212, 213, 214, 215, 216, 217, 218, 219, 220, 221, 222, 223, 224, 225, 226, 227, 228, 229, 230, 231, 232, 233, 234, 235, 236, 237, 238, 239, 240, 241, 242, 243, 244, 245, 246, 247, 248, 249, 250, 251, 252, 253, 254, 255, 256, 257, 258, 259, 260, 261, 262, 263, 264, 265, 266, 267, 268, 269, 270, 271, 272, 273, 274, 275, 276, 277, 278, 279, 280, 281, 282, 283, 284, 285, 286, 287, 288, 289, 290, 291, 292, 293, 294, 295, 296, 297, 298, 299, 300, 301, 302, 303, 304, 305, 306, 307, 308, 309, 310, 311, 312, 313, 314, 315, 316, 317, 318, 319, 320, 321, 322, 323, 324, 325, 326, 327, 328, 329, 330, 331, 332, 333, 334, 335, 336, 337, 338, 339, 340, 341, 342, 343, 344, 345, 346, 347, 348, 349, 350, 351, 352, 353, 354, 355, 356, 357, 358, 359, 360, 361, 362, 363, 364, 365, 366, 367, 368, 369, 370, 371, 372, 373, 374, 375, 376, 377, 378, 379, 380, 381, 382, 383, 384, 385, 386, 387, 388, 389, 390, 391, 392, 393, 394, 395, 396, 397, 398, 399, 400, 401, 402, 403, 404, 405, 406, 407, 408, 409, 410, 411, 412, 413, 414, 415, 416, 417, 418, 419, 420, 421, 422, 423, 424, 425, 426, 427, 428, 429, 430, 431, 432, 433, 434, 435, 436, 437, 438, 439, 440, 441, 442, 443, 444, 445, 446, 447, 448, 449, 450, 451, 452, 453, 454, 455, 456, 457, 458, 459, 460, 461, 462, 463, 464, 465, 466, 467, 468, 469, 470, 471, 472, 473, 474, 475, 476, 477, 478, 479, 480, 481, 482, 483, 484, 485, 486, 487, 488, 489, 490, 491, 492, 493, 494, 495, 496, 497, 498, 499, 500, 501, 502, 503, 504, 505, 506, 507, 508, 509, 510, 511, 512, 513, 514, 515, 516, 517, 518, 519, 520, 521, 522, 523, 524, 525, 526, 527, 528, 529, 530, 531, 532, 533, 534, 535, 536, 537, 538, 539, 540, 541, 542, 543, 544, 545, 546, 547, 548, 549, 550, 551, 552, 553, 554, 555, 556, 557, 558, 559, 560, 561, 562, 563, 564, 565, 566, 567, 568, 569, 570, 571, 572, 573, 574, 575, 576, 577, 578, 579, 580, 581, 582, 583, 584, 585, 586, 587, 588, 589, 590, 591, 592, 593, 594, 595, 596, 597, 598, 599, 600, 601, 602, 603, 604, 605, 606, 607, 608, 609, 610, 611, 612, 613, 614, 615, 616, 617, 618, 619, 620, 621, 622, 623, 624, 625, 626, 627, 628, 629, 630, 631, 632, 633, 634, 635, 636, 637, 638, 639, 640, 641, 642, 643, 644, 645, 646, 647, 648, 649, 650, 651, 652, 653, 654, 655, 656, 657, 658, 659, 660, 661, 662, 663, 664, 665, 666, 667, 668, 669, 670, 671, 672, 673, 674, 675, 676, 677, 678, 679, 680, 681, 682, 683, 684, 685, 686, 687, 688, 689, 690, 691, 692, 693, 694, 695, 696, 697, 698, 699, 700, 701, 702, 703, 704, 705, 706, 707, 708, 709, 710, 711, 712, 713, 714, 715, 716, 717, 718, 719, 720, 721, 722, 723, 724, 725, 726, 727, 728, 729, 730, 731, 732, 733, 734, 735, 736, 737, 738, 739, 740, 741, or 742 of SEQ ID NO: 1.

[0086] In some embodiments, a lanosterol synthase comprises an amino acid change at one or more positions selected from position 1, 2, 3, 4, 5, 6, 7, 8, 9, 10, 11, 12, 13, 14, 15, 16, 17, 18, 19, 20, 21, 22, 23, 24, 25, 26, 27, 28, 29, 30, 31, 32, 33, 34, 35, 36, 37, 38, 39, 40, 41, 42, 43, 44, 45, 46, 47, 48, 49, 50, 51, 52, 53, 54, 55, 56, 57, 58, 59, 60, 61, 62, 63, 64, 65, 66, 67, 68, 69, 70, 71, 72, 73, 74, 75, 76, 77, 78, 79, 80, 81, 82, 83, 84, 85, 86, 87, 88, 89, 90, 91, 92, 93, 94, 95, 96, 97, 98, 99, 100, 101, 102, 103, 104, 105, 106, 107, 108, 109, 110, 111, 112, 113, 114, 115, 116, 117, 118, 119, 120, 121, 122, 123, 124, 125, 126, 127, 128, 129, 130, 131, 132, 133, 134, 135, 136, 137, 138, 139, 140, 141, 142, 143, 144, 145, 146, 147, 148, 149, 150, 151, 152, 153, 154, 155, 156, 157, 158, 159, 160, 161, 162, 163, 164, 165, 166, 167, 168, 169, 170, 171, 172, 173, 174, 175, 176, 177, 178, 179, 180, 181, 182, 183, 184, 185, 186, 187, 188, 189, 190, 191, 192, 193, 194, 195, 196, 197, 198, 199, 200, 201, 202, 203, 204, 205, 206, 207, 208, 209, 210, 211, 212, 213, 214, 215, 216, 217, 218, 219, 220, 221, 222, 223, 224, 225, 226, 227, 228, 229, 230, 231, 232, 233, 234, 235, 236, 237, 238, 239, 240, 241, 242, 243, 244, 245, 246, 247, 248, 249, 250, 251, 252, 253, 254, 255, 256, 257, 258, 259, 260, 261, 262, 263, 264, 265, 266, 267, 268, 269, 270, 271, 272, 273, 274, 275, 276, 277, 278, 279, 280, 281, 282, 283, 284, 285, 286, 287, 288, 289, 290, 291, 292, 293, 294, 295, 296, 297, 298, 299, 300, 301, 302, 303, 304, 305, 306, 307, 308, 309, 310, 311, 312, 313, 314, 315, 316, 317, 318, 319, 320, 321, 322, 323, 324, 325, 326, 327, 328, 329, 330, 331, 332, 333, 334, 335, 336, 337, 338, 339, 340, 341, 342, 343, 344, 345, 346, 347, 348, 349, 350, 351, 352, 353, 354, 355, 356, 357, 358, 359, 360, 361, 362, 363, 364, 365, 366, 367, 368, 369, 370, 371, 372, 373, 374, 375, 376, 377, 378, 379, 380, 381, 382, 383, 384, 385, 386, 387, 388, 389, 390, 391, 392, 393, 394, 395, 396, 397, 398, 399, 400, 401, 402, 403, 404, 405, 406, 407, 408, 409, 410, 411, 412, 413, 414, 415, 416, 417, 418, 419, 420, 421, 422, 423, 424, 425, 426, 427, 428, 429, 430, 431, 432, 433, 434, 435, 436, 437, 438, 439, 440, 441, 442, 443, 444, 445, 446, 447, 448, 449, 450, 451, 452, 453, 454, 455, 456, 457, 458, 459, 460, 461, 462, 463, 464, 465, 466, 467, 468, 469, 470, 471, 472, 473, 474, 475, 476, 477, 478, 479, 480, 481, 482, 483, 484, 485, 486, 487, 488, 489, 490, 491, 492, 493, 494, 495, 496, 497, 498, 499, 500, 501, 502, 503, 504, 505, 506, 507, 508, 509, 510, 511, 512, 513, 514, 515, 516, 517, 518, 519, 520, 521, 522, 523, 524, 525, 526, 527, 528, 529, 530, 531, 532, 533, 534, 535, 536, 537, 538, 539, 540, 541, 542, 543, 544, 545, 546, 547, 548, 549, 550, 551, 552, 553, 554, 555, 556, 557, 558, 559, 560, 561, 562, 563, 564, 565, 566, 567, 568, 569, 570, 571, 572, 573, 574, 575, 576, 577, 578, 579, 580, 581, 582, 583, 584, 585, 586, 587, 588, 589, 590, 591, 592, 593, 594, 595, 596, 597, 598, 599, 600, 601, 602, 603, 604, 605, 606, 607, 608, 609, 610, 611, 612, 613, 614, 615, 616, 617, 618, 619, 620, 621, 622, 623, 624, 625, 626, 627, 628, 629, 630, 631, 632, 633, 634, 635, 636, 637, 638, 639, 640, 641, 642, 643, 644, 645, 646, 647, 648, 649, 650, 651, 652, 653, 654, 655, 656, 657, 658, 659, 660, 661, 662, 663, 664, 665, 666, 667, 668, 669, 670, 671, 672, 673, 674, 675, 676, 677, 678, 679, 680, 681, 682, 683, 684, 685, 686, 687, 688, 689, 690, 691, 692, 693, 694, 695, 696, 697, 698, 699, 700, 701, 702, 703, 704, 705, 706, 707, 708, 709, 710, 711, 712, 713, 714, 715, 716, 717, 718, 719, 720, 721, 722, 723, 724, 725, 726, 727, 728, 729, 730, or 731 of SEQ ID NO: 313.

[0087] In some embodiments, the amino acid change is a substitution, insertion, or a deletion. In some embodiments, the amino acid change results in a truncation or lengthening of a lanosterol synthase relative to a control. In some embodiments, a control is a wild-type lanosterol synthase. In some embodiments, a control is a different lanosterol synthase. As a non-limiting example, a lanosterol synthase may comprise one or more changes indicated in Tables 3, 5, 6A-6B, 7, 8, 9, 10, and 11 relative to SEQ ID NO: 1 or 313.

[0088] In some embodiments, a lanosterol synthase comprises an amino acid substitution or deletion relative to SEQ ID NO: 1 at one or more residues corresponding to position 14, 33, 47, 50, 66, 80, 83, 85, 92, 94, 107, 122, 132, 145, 158, 170, 172, 184, 193, 197, 198, 212, 213, 227, 228, 231, 235, 248, 249, 260, 282, 286, 287, 289, 295, 296, 309, 314, 316, 329, 344, 360, 370, 371, 372, 398, 407, 414, 417, 423, 432, 437, 442, 444, 452, 474, 479, 491, 498, 515, 526, 529, 536, 544, 552, 559, 560, 564, 578, 586, 608, 610, 617, 619, 620, 631, 638, 650, 655, 660, 679, 686, 702, 710, 726, 736, 738, and/or 742 in SEQ ID NO: 1. In some embodiments, a lanosterol synthase comprises: the amino acid Y at the residue corresponding to position 14 in SEQ ID NO:1; the amino acid Q at the residue corresponding to position 33 in SEQ ID NO:1; the amino acid E at the residue corresponding to position 47 in SEQ ID NO:1; the amino acid G at the residue corresponding to position 50 in SEQ ID NO:1; the amino acid R at the residue corresponding to position 66 in SEQ ID NO: 1; the amino acid G at the residue corresponding to position 80 in SEQ ID NO: 1; the amino acid L at the residue corresponding to position 83 in SEQ ID NO: 1; the amino acid N at the residue corresponding to position 85 in SEQ ID NO:1; the amino acid I at the residue corresponding to position 92 in SEQ ID NO:1; the amino acid S at the residue corresponding to position 94 in SEQ ID NO:1; the amino acid D at the residue corresponding to position 107 in SEQ ID NO:1; the amino acid C at the residue corresponding to position 122 in SEQ ID NO:1; the amino acid S at the residue corresponding to position 132 in SEQ ID NO: 1; the amino acid C at the residue corresponding to position 145 in SEQ ID NO:1; the amino acid S at the residue corresponding to position 158 in SEQ ID NO:1; the amino acid A at the residue corresponding to position 170 in SEQ ID NO: 1; the amino acid N at the residue corresponding to position 172 in SEQ ID NO:1; the amino acid W at the residue corresponding to position 184 in SEQ ID NO:1; the amino acid C or H at the residue corresponding to position 193 in SEQ ID NO:1; the amino acid V at the residue corresponding to position 197 in SEQ ID NO:1; the amino acid I at the residue corresponding to position 198 in SEQ ID NO: 1; the amino acid I at the residue corresponding to position 212 in SEQ ID NO:1; the amino acid L at the residue corresponding to position 213 in SEQ ID NO:1; the amino acid L at the residue corresponding to position 227 in SEQ ID NO:1; the amino acid T at the residue corresponding to position 228 in SEQ ID NO: 1; the amino acid V at the residue corresponding to position 231 in SEQ ID NO: 1; the amino acid M at the residue corresponding to position 235 in SEQ ID NO:1; the amino acid F at the residue corresponding to position 248 in SEQ ID NO:1; the amino acid L at the residue corresponding to position 249 in SEQ ID NO:1; the amino acid R at the residue corresponding to position 260 in SEQ ID NO:1; the amino acid I at the residue corresponding to position 282 in SEQ ID NO:1; the amino acid F at the residue corresponding to position 286 in SEQ ID NO: 1; the amino acid G at the residue corresponding to position 287 in SEQ ID NO:1; the amino acid G at the residue corresponding to position 289 in SEQ ID NO: 1; the amino acid I at the residue corresponding to position 295 in SEQ ID NO: 1; the amino acid T at the residue corresponding to position 296 in SEQ ID NO: 1; the amino acid F at the residue corresponding to position 309 in SEQ ID NO: 1; the amino acid S at the residue corresponding to position 314 in SEQ ID NO:1; the amino acid R at the residue corresponding to position 316 in SEQ ID NO: 1; the amino acid N at the residue corresponding to position 329 in SEQ ID NO:1; the amino acid A at the residue corresponding to position 344 in SEQ ID NO: 1; the amino acid S at the residue corresponding to position 360 in SEQ ID NO:1; the amino acid L at the residue corresponding to position 370 in SEQ ID NO:1; the amino acid V at the residue corresponding to position 371 in SEQ ID NO:1; the amino acid P at the residue corresponding to position 372 in SEQ ID NO:1; the amino acid I at the residue corresponding to position 398 in SEQ ID NO: 1; the amino acid V at the residue corresponding to position 407 in SEQ ID NO:1; the amino acid S at the residue corresponding to position 414 in SEQ ID NO:1; the amino acid S at the residue corresponding to position 417 in SEQ ID NO:1; the amino acid L at the residue corresponding to position 423 in SEQ ID NO:1; the amino acid I or S at the residue corresponding to position 432 in SEQ ID NO: 1; the amino acid L at the residue corresponding to position 437 in SEQ ID NO:1; the amino acid V at the residue corresponding to position 442 in SEQ ID NO:1; the amino acid M or S at the residue corresponding to position 444 in SEQ ID NO:1; the amino acid G at the residue corresponding to position 452 in SEQ ID NO: 1; the amino acid V at the residue corresponding to position 474 in SEQ ID NO:1; the amino acid S at the residue corresponding to position 479 in SEQ ID NO:1; the amino acid Q at the residue corresponding to position 491 in SEQ ID NO:1; the amino acid N at the residue corresponding to position 498 in SEQ ID NO: 1; the amino acid L at the residue corresponding to position 515 in SEQ ID NO:1; the amino acid T at the residue corresponding to position 526 in SEQ ID NO:1; the amino acid T at the residue corresponding to position 529 in SEQ ID NO:1; the amino acid F at the residue corresponding to position 536 in SEQ ID NO:1; the amino acid Y at the residue corresponding to position 544 in SEQ ID NO:1; the amino acid E at the residue corresponding to position 552 in SEQ ID NO:1; the amino acid A at the residue corresponding to position 559 in SEQ ID NO:1; the amino acid M at the residue corresponding to position 560 in SEQ ID NO: 1; the amino acid C or N at the residue corresponding to position 564 in SEQ ID NO:1; the amino acid P at the residue corresponding to position 578 in SEQ ID NO:1; the amino acid F at the residue corresponding to position 586 in SEQ ID NO:1; the amino acid T at the residue corresponding to position 608 in SEQ ID NO:1; the amino acid I at the residue corresponding to position 610 in SEQ ID NO: 1; the amino acid V at the residue corresponding to position 617 in SEQ ID NO:1; the amino acid L at the residue corresponding to position 619 in SEQ ID NO:1; the amino acid S at the residue corresponding to position 620 in SEQ ID NO:1; the amino acid E or R at the residue corresponding to position 631 in SEQ ID NO:1; the amino acid D at the residue corresponding to position 638 in SEQ ID NO: 1; the amino acid L at the residue corresponding to position 650 in SEQ ID NO:1; the amino acid A at the residue corresponding to position 655 in SEQ ID NO:1; the amino acid H at the residue corresponding to position 660 in SEQ ID NO:1; the amino acid S at the residue corresponding to position 679 in SEQ ID NO:1; the amino acid E at the residue corresponding to position 686 in SEQ ID NO: 1; the amino acid D at the residue corresponding to position 702 in SEQ ID NO:1; the amino acid Q at the residue corresponding to position 710 in SEQ ID NO:1; the amino acid L or V at the residue corresponding to position 726 in SEQ ID NO:1; the amino acid F at the residue corresponding to position 736 in SEQ ID NO:1; the amino acid M at the residue corresponding to position 738 in SEQ ID NO:1; and/or a truncation that results in deletion of the residue corresponding to position 742 in SEQ ID NO: 1. In some embodiments, a lanosterol synthase comprises the amino acid substitution E617V, G107D, and/or K631E relative to SEQ ID NO: 1.

[0089] In some embodiments, relative to SEQ ID NO: 1, a lanosterol synthase comprises: R33Q, R193C, D289G, N295I, S296T, N620S, and Y736F; R184W, L235M, L260R, and E710Q; K47E, L92I, T360S, S372P, T444M, and R578P; D50G, K66R, N94S, G417S, E617V, and F726L; N14Y, N132S, Y145C, R193H, I286F, L316R, F432I, E442V, T444S, I479S, K631R, and T655A; F432S, D452G, and I536F; E287G, K329N, E617V, and F726V; E231V, A407V, Q423L, A529T, and Y564C; V248F, D371V, and G702D; L197V, K282I, N314S, P370L, A608T, G638D, and F650L; L491Q, Y586F, and R660H; G122C, H249L, and K738M; P227L, E474V, V559A, and Y564N; K85N, G158S, S515L, P526T, Q619L, and a truncation resulting in a deletion of the residue corresponding to Q742 in SEQ ID NO: 1; G107D and K631E; T212I, W213L, N544Y, and V552E; I172N, C414S, L560M, and G679S; R193C, D289G, N295I, S296T, N620S, and Y736F; K85N and G158S; L197V, K282I, N314S, and P370L; I172N, C414S, and L560M; D371V, M610I, and G702D; D371V, K498N, M610I, and G702D; D80G, P83L, T170A, T198I, and A228T; T360S, S372P, T444M, and R578P; D50G, K66R, N94S, G417S, and E617V; or L309F, V344A, T398I, and K686E.

[0090] In some embodiments, relative to SEQ ID NO: 1, the lanosterol synthase comprises the following amino acid substitutions: R193C, D289G, N295I, S296T, N620S, and Y736F; F432S, D452G, and I536F; K85N and G158S; L197V, K282I, N314S, and P370L; I172N, C414S, L560M, and G679S; I172N, C414S, and L560M; D371V, M610I, and G702D; D371V, K498N, M610I, and G702D; D80G, P83L, T170A, T198I, and A228T; D50G, K66R, N94S, G417S, E617V, and F726L; T360S, S372P, T444M, and R578P; D50G, K66R, N94S, G417S, and E617V; and L309F, V344A, T398I, and K686E.

[0091] In some embodiments, relative to SEQ ID NO: 1, the lanosterol synthase comprises the following amino acid substitutions: D50G, K66R, N94S, G417S, E617V, and F726L; K85N and G158S; K47E, L92I, T360S, S372P, T444M, and R578P; F432S, D452G, and I536F; T360S, S372P, T444M, and R578P; L491Q, Y586F, and R660H; K85N, G158S, S515L, P526T, Q619L, and a truncation that results in deletion of the residue corresponding to position 742 in SEQ ID NO: 1; or I172N, C414S, L560M, and G679S.

[0092] In some embodiments, a lanosterol comprises an amino acid substitution or deletion relative to SEQ ID NO: 1 at one or more residues corresponding to position 14, 33, 47, 50, 66, 85, 92, 94, 122, 132, 145, 158, 193, 231, 248, 249, 286, 287, 289, 295, 296, 316, 329, 360, 371, 372, 407, 417, 423, 432, 442, 444, 479, 515, 526, 529, 564, 578, 617, 619, 620, 631, 655, 702, 726, 736, 738, and/or 742 in SEQ ID NO: 1. In some embodiments, relative to SEQ ID NO: 1, a lanosterol synthase comprises: R33Q, R193C, D289G, N295I, S296T, N620S, and Y736F; K47E, L92I, T360S, S372P, T444M, and R578P; D50G, K66R, N94S, G417S, E617V, and F726L; N14Y, N132S, Y145C, R193H, I286F, L316R, F432I, E442V, T444S, I479S, K631R, and T655A; E287G, K329N, E617V, and F726V; E231V. A407V, Q423L, A529T, and Y564C; V248F, D371V, and G702D; G122C, H249L, and K738M; or K85N, G158S, S515L, P526T, and Q619L, and a truncation resulting in a deletion of the residue corresponding to Q742 in SEQ ID NO: 1.

[0093] In some embodiments, the host cell comprises a heterologous polynucleotide encoding a lanosterol synthase, wherein the lanosterol synthase comprises an amino acid substitution or deletion relative to SEQ ID NO: 313 at one or more residues corresponding to position 64, 120, 121, 136, 226, 268, 275, 281, 300, 322, 333, 438, 502, 604, 619, 628, 656, 693, 726, 727, 728, 729, 730, and/or 731.

[0094] In some embodiments, the lanosterol synthase comprises: the amino acid G at the residue corresponding to position 64 in SEQ ID NO: 313; the amino acid V at the residue corresponding to position 120 in SEQ ID NO: 313; the amino acid S at the residue corresponding to position 121 in SEQ ID NO: 313; the amino acid V at the residue corresponding to position 136 in SEQ ID NO: 313; the amino acid I at the residue corresponding to position 226 in SEQ ID NO: 313; the amino acid S at the residue corresponding to position 268 in SEQ ID NO: 313; the amino acid I at the residue corresponding to position 275 in SEQ ID NO: 313; the amino acid A at the residue corresponding to position 281 in SEQ ID NO: 313; the amino acid G at the residue corresponding to position 300 in SEQ ID NO: 313; the amino acid G at the residue corresponding to position 322 in SEQ ID NO: 313; the amino acid A at the residue corresponding to position 333 in SEQ ID NO: 313; the amino acid E at the residue corresponding to position 438 in SEQ ID NO: 313; the amino acid L at the residue corresponding to position 502 in SEQ ID NO: 313; the amino acid N at the residue corresponding to position 604 in SEQ ID NO: 313; the amino acid S at the residue corresponding to position 619 in SEQ ID NO: 313; the amino acid E at the residue corresponding to position 628 in SEQ ID NO: 313; the amino acid T at the residue corresponding to position 656 in SEQ ID NO: 313; the amino acid G at the residue corresponding to position 693 in SEQ ID NO: 313; and/or deletion of residues corresponding to positions 726-731 in SEQ ID NO: 313.

[0095] In some embodiments, the lanosterol synthase comprises relative to SEQ ID NO: 313: P121S, A136V, S300G, V322G, K438E, F502L, K628E, and deletion of residues corresponding to positions 726-731 in SEQ ID NO: 313; K268S, T281A, F502L, T604N, A656T, and E693G; or C619S, F275I, I120V, M226I, R64G, and T333A.

[0096] It should be appreciated that activity, such as specific activity, of a lanosterol synthase can be measured by any means known to one of ordinary skill in the art. In some embodiments, production of mogrol, one or more mogrol precursors, and/or one or more mogrosides can be used to determine lanosterol activity. As a non-limiting example, mevalonate production may be used as a readout of lanosterol synthase activity. For example, a lanosterol synthase with reduced activity may increase mevalonate production in a host cell relative to a control. In some embodiments, a control is a host cell with a different lanosterol synthase. In some embodiments, a control is a host cell with a wild-type lanosterol synthase.

[0097] The activity of a lanosterol synthase may be altered using any suitable method known in the art. In some embodiments, one or more amino acid changes reduces the activity of a lanosterol synthase as compared to a control lanosterol synthase. In some embodiments, a control lanosterol synthase is a wild-type lanosterol synthase. In some embodiments, the expression of a lanosterol synthase is altered to affect lanosterol synthase activity. In some embodiments, a host cell comprises a heterologous polynucleotide that is capable of reducing lanosterol synthase activity. In some embodiments, a reduction in lanosterol synthase expression in a host cell reduces lanosterol synthase activity. In some embodiments, the activity of a lanosterol synthase is reduced using: a weak promoter to drive expression of the lanosterol synthase, one or more codons that are not optimized for a particular host cell, use of an antisense nucleic acid, a genetic modification that alters gene expression and/or introduces one or more alterations, alteration of a promoter driving expression of a lanosterol synthase and/or altering the coding sequence of a lanosterol synthase.

[0098] In some embodiments, a lanosterol synthase is capable of increasing production of a mogrol precursor, mogrol, and/or a mogroside by a host cell by at least 0.01%, at least 0.05%, at least 1%, at least 5%, at least 10%, at least 15%, at least 20%, at least 25%, at least 30%, at least 35%, at least 40%, at least 45%, at least 50%, at least 55%, at least 60%, at least 65%, at least 70%, at least 75%, at least 80%, at least 85%, at least 90%, at least 95%, at least 100%, at least 150%, at least 200%, at least 250%, at least 300%, at least 350%, at least 400%, at least 450%, at least 500%, at least 550%, at least 600%, at least 650%, at least 700%, at least 750%, at least 800%, at least 850%, at least 900%, at least 950%, or at least 1000%, including all values in between as compared to production of the mogrol precursor, mogrol, and/or the mogroside by a host cell that does not comprise the lanosterol synthase. In some embodiments, a lanosterol synthase is capable of increasing production of a mogrol precursor, mogrol, and/or a mogroside by a host cell at most 5%, at most 10%, at most 15%, at most 20%, at most 25%, at most 30%, at most 35%, at most 40%, at most 45%, at most 50%, at most 55%, at most 60%, at most 65%, at most 70%, at most 75%, at most 80%, at most 85%, at most 90%, at most 95%, at most 100%, at most 150%, at most 200%, at most 250%, at most 300%, at most 350%, at most 400%, at most 450%, at most 500%, at most 550%, at most 600%, at most 650%, at most 700%, at most 750%, at most 800%, at most 850%, at most 900%, at most 950%, or at most 1000%, including all values in between as compared to production of the mogrol precursor, mogrol, and/or the mogroside by a host cell that does not comprise the lanosterol synthase. In some embodiments, a lanosterol synthase is capable of increasing production of a mogrol precursor, mogrol, and/or a mogroside by a host cell between 0.01% and 1%, between 1% and 10%, between 10% and 20%, between 10% and 50%, between 50% and 100%, between 100% and 200%, between 200% and 300%, between 300% and 400%, between 400% and 500%, between 500% and 600%, between 600% and 700%, between 700% and 800%, between 800% and 900%, between 900% and 1000%, between 1% and 50%, between 1% and 100%, between 1% and 500%, or between 1% and 1,000%, including all values in between as compared to production of the mogrol precursor, mogrol, and/or the mogroside by a host cell that does not comprise the lanosterol synthase. In some embodiments, a lanosterol synthase is capable of increasing production of a mogrol precursor, mogrol, and/or a mogroside by a host cell at least 1.1 fold, at least 1.2 fold, at least 1.3 fold, at least 1.4 fold, at least 1.5 fold, at least 1.6 fold, at least 1.7 fold, at least 1.8 fold, at least 1.9 fold, at least 2 fold, at least 2.1 fold, at least 2.2 fold, at least 2.3 fold, at least 2.4 fold, at least 2.5 fold, at least 2.6 fold, at least 2.7 fold, at least 2.8 fold, at least 2.9 fold, at least 3 fold, at least 3.1 fold, at least 3.2 fold, at least 3.3 fold, at least 3.4 fold, at least 3.5 fold, at least 3.6 fold, at least 3.7 fold, at least 3.8 fold, at least 3.9 fold, at least 4 fold, at least 4.1 fold, at least 4.2 fold, at least 4.3 fold, at least 4.4 fold, at least 4.5 fold, at least 4.6 fold, at least 4.7 fold, at least 4.8 fold, at least 4.9 fold, at least 5 fold, at least 5.1 fold, at least 5.2 fold, at least 5.3 fold, at least 5.4 fold, at least 5.5 fold, at least 5.6 fold, at least 5.7 fold, at least 5.8 fold, at least 5.9 fold, at least 6 fold, at least 6.1 fold, at least 6.2 fold, at least 6.3 fold, at least 6.4 fold, at least 6.5 fold, at least 6.6 fold, at least 6.7 fold, at least 6.8 fold, at least 6.9 fold, at least 7 fold, at least 7.1 fold, at least 7.2 fold, at least 7.3 fold, at least 7.4 fold, at least 7.5 fold, at least 7.6 fold, at least 7.7 fold, at least 7.8 fold, at least 7.9 fold, at least 8 fold, at least 8.1 fold, at least 8.2 fold, at least 8.3 fold, at least 8.4 fold, at least 8.5 fold, at least 8.6 fold, at least 8.7 fold, at least 8.8 fold, at least 8.9 fold, at least 9 fold, at least 9.1 fold, at least 9.2 fold, at least 9.3 fold, at least 9.4 fold, at least 9.5 fold, at least 9.6 fold, at least 9.7 fold, at least 9.8 fold, at least 9.9 fold, at least 10 fold, at least 11 fold, at least 12 fold, at least 13 fold, at least 14 fold, at least 15 fold, at least 16 fold, at least 17 fold, at least 18 fold, at least 19 fold, at least 20 fold, at least 21 fold, at least 22 fold, at least 23 fold, at least 24 fold, at least 25 fold, at least 26 fold, at least 27 fold, at least 28 fold, at least 29 fold, at least 30 fold, at least 31 fold, at least 32 fold, at least 33 fold, at least 34 fold, at least 35 fold, at least 36 fold, at least 37 fold, at least 38 fold, at least 39 fold, at least 40 fold, at least 41 fold, at least 42 fold, at least 43 fold, at least 44 fold, at least 45 fold, at least 46 fold, at least 47 fold, at least 48 fold, at least 49 fold, at least 50 fold, at least 51 fold, at least 52 fold, at least 53 fold, at least 54 fold, at least 55 fold, at least 56 fold, at least 57 fold, at least 58 fold, at least 59 fold, at least 60 fold, at least 61 fold, at least 62 fold, at least 63 fold, at least 64 fold, at least 65 fold, at least 66 fold, at least 67 fold, at least 68 fold, at least 69 fold, at least 70 fold, at least 71 fold, at least 72 fold, at least 73 fold, at least 74 fold, at least 75 fold, at least 76 fold, at least 77 fold, at least 78 fold, at least 79 fold, at least 80 fold, at least 81 fold, at least 82 fold, at least 83 fold, at least 84 fold, at least 85 fold, at least 86 fold, at least 87 fold, at least 88 fold, at least 89 fold, at least 90 fold, at least 91 fold, at least 92 fold, at least 93 fold, at least 94 fold, at least 95 fold, at least 96 fold, at least 97 fold, at least 98 fold, at least 99 fold, at least 100 fold, at least 200 fold, at least 300 fold, at least 400 fold, at least 500 fold, at least 600 fold, at least 700 fold, at least 800 fold, at least 900 fold, or at least 1000 fold, including all values in between as compared to production of the mogrol precursor, mogrol, and/or the mogroside by a host cell that does not comprise the lanosterol synthase. In some embodiments, the mogrol precursor is mevalonate. In some embodiments, the mogrol precursor is 2-3-oxidosqualene. In some embodiments, the mogrol precursor is cucurbitadienol.

[0099] In some embodiments, a host cell comprising a lanosterol synthase is capable of producing at least 0.01 mg/L, at least 0.05 mg/L, at least 1 mg/L, at least 5 mg/L, at least 10 mg/L, at least 15 mg/L, at least 20 mg/L, at least 25 mg/L, at least 30 mg/L, at least 35 mg/L, at least 40 mg/L, at least 45 mg/L, at least 50 mg/L, at least 55 mg/L, at least 60 mg/L, at least 65 mg/L, at least 70 mg/L, at least 75 mg/L, at least 80 mg/L, at least 85 mg/L, at least 90 mg/L, at least 95 mg/L, at least 100 mg/L, at least 150 mg/L, at least 200 mg/L, at least 250 mg/L, at least 300 mg/L, at least 350 mg/L, at least 400 mg/L, at least 450 mg/L, at least 500 mg/L, at least 550 mg/L, at least 600 mg/L, at least 650 mg/L, at least 700 mg/L, at least 750 mg/L, at least 800 mg/L, at least 850 mg/L, at least 900 mg/L, at least 950 mg/L, at least 1 g/L, at least 1.1 g/L, at least 1.2 g/L, at least 1.3 g/L, at least 1.4 g/L, at least 1.5 g/L, at least 1.6 g/L, at least 1.7 g/L, at least 1.8 g/L, at least 1.9 g/L, at least 2 g/L, at least 2.1 g/L, at least 2.2 g/L, at least 2.3 g/L, at least 2.4 g/L, at least 2.5 g/L, at least 2.6 g/L, at least 2.7 g/L, at least 2.8 g/L, at least 2.9 g/L, at least 3 g/L, at least 3.1 g/L, at least 3.2 g/L, at least 3.3 g/L, at least 3.4 g/L, at least 3.5 g/L, at least 3.6 g/L, at least 3.7 g/L, at least 3.8 g/L, at least 3.9 g/L, at least 4 g/L, at least 4.1 g/L, at least 4.2 g/L, at least 4.3 g/L, at least 4.4 g/L, at least 4.5 g/L, at least 4.6 g/L, at least 4.7 g/L, at least 4.8 g/L, at least 4.9 g/L, at least 5 g/L, at least 5.1 g/L, at least 5.2 g/L, at least 5.3 g/L, at least 5.4 g/L, at least 5.5 g/L, at least 5.6 g/L, at least 5.7 g/L, at least 5.8 g/L, at least 5.9 g/L, at least 6 g/L, at least 6.1 g/L, at least 6.2 g/L, at least 6.3 g/L, at least 6.4 g/L, at least 6.5 g/L, at least 6.6 g/L, at least 6.7 g/L, at least 6.8 g/L, at least 6.9 g/L, at least 7 g/L, at least 7.1 g/L, at least 7.2 g/L, at least 7.3 g/L, at least 7.4 g/L, at least 7.5 g/L, at least 7.6 g/L, at least 7.7 g/L, at least 7.8 g/L, at least 7.9 g/L, at least 8 g/L, at least 8.1 g/L, at least 8.2 g/L, at least 8.3 g/L, at least 8.4 g/L, at least 8.5 g/L, at least 8.6 g/L, at least 8.7 g/L, at least 8.8 g/L, at least 8.9 g/L, at least 9 g/L, at least 9.1 g/L, at least 9.2 g/L, at least 9.3 g/L, at least 9.4 g/L, at least 9.5 g/L, at least 9.6 g/L, at least 9.7 g/L, at least 9.8 g/L, at least 9.9 g/L, at least 10 g/L, at least 20 g/L, at least 30 g/L, at least 40 g/L, at least 50 g/L, at least 60 g/L, at least 70 g/L, at least 80 g/L, at least 90 g/L, at least 100 g/L, at least 200 g/L, at least 300 g/L, at least 400 g/L, at least 500 g/L, at least 600 g/L, at least 700 g/L, at least 800 g/L, at least 900 g/L, or at least 1000 g/L including all values in between of a mogrol precursor, mogrol, and/or a mogroside. In some embodiments, a host cell comprising a lanosterol synthase is capable of producing at most 5 mg/L, at most 10 mg/L, at most 15 mg/L, at most 20 mg/L, at most 25 mg/L, at most 30 mg/L, at most 35 mg/L, at most 40 mg/L, at most 45 mg/L, at most 50 mg/L, at most 55 mg/L, at most 60 mg/L, at most 65 mg/L, at most 70 mg/L, at most 75 mg/L, at most 80 mg/L, at most 85 mg/L, at most 90 mg/L, at most 95 mg/L, at most 100 mg/L, at most 150 mg/L, at most 200 mg/L, at most 250 mg/L, at most 300 mg/L, at most 350 mg/L, at most 400 mg/L, at most 450 mg/L, at most 500 mg/L, at most 550 mg/L, at most 600 mg/L, at most 650 mg/L, at most 700 mg/L, at most 750 mg/L, at most 800 mg/L, at most 850 mg/L, at most 900 mg/L, at most 950 mg/L, at most 1 g/L, at most 1.1 g/L, at most 1.2 g/L, at most 1.3 g/L, at most 1.4 g/L, at most 1.5 g/L, at most 1.6 g/L, at most 1.7 g/L, at most 1.8 g/L, at most 1.9 g/L, at most 2 g/L, at most 2.1 g/L, at most 2.2 g/L, at most 2.3 g/L, at most 2.4 g/L, at most 2.5 g/L, at most 2.6 g/L, at most 2.7 g/L, at most 2.8 g/L, at most 2.9 g/L, at most 3 g/L, at most 3.1 g/L, at most 3.2 g/L, at most 3.3 g/L, at most 3.4 g/L, at most 3.5 g/L, at most 3.6 g/L, at most 3.7 g/L, at most 3.8 g/L, at most 3.9 g/L, at most 4 g/L, at most 4.1 g/L, at most 4.2 g/L, at most 4.3 g/L, at most 4.4 g/L, at most 4.5 g/L, at most 4.6 g/L, at most 4.7 g/L, at most 4.8 g/L, at most 4.9 g/L, at most 5 g/L, at most 5.1 g/L, at most 5.2 g/L, at most 5.3 g/L, at most 5.4 g/L, at most 5.5 g/L, at most 5.6 g/L, at most 5.7 g/L, at most 5.8 g/L, at most 5.9 g/L, at most 6 g/L, at most 6.1 g/L, at most 6.2 g/L, at most 6.3 g/L, at most 6.4 g/L, at most 6.5 g/L, at most 6.6 g/L, at most 6.7 g/L, at most 6.8 g/L, at most 6.9 g/L, at most 7 g/L, at most 7.1 g/L, at most 7.2 g/L, at most 7.3 g/L, at most 7.4 g/L, at most 7.5 g/L, at most 7.6 g/L, at most 7.7 g/L, at most 7.8 g/L, at most 7.9 g/L, at most 8 g/L, at most 8.1 g/L, at most 8.2 g/L, at most 8.3 g/L, at most 8.4 g/L, at most 8.5 g/L, at most 8.6 g/L, at most 8.7 g/L, at most 8.8 g/L, at most 8.9 g/L, at most 9 g/L, at most 9.1 g/L, at most 9.2 g/L, at most 9.3 g/L, at most 9.4 g/L, at most 9.5 g/L, at most 9.6 g/L, at most 9.7 g/L, at most 9.8 g/L, at most 9.9 g/L, at most 10 g/L, at most 20 g/L, at most 30 g/L, at most 40 g/L, at most 50 g/L, at most 60 g/L, at most 70 g/L, at most 80 g/L, at most 90 g/L, at most 100 g/L, at most 200 g/L, at most 300 g/L, at most 400 g/L, at most 500 g/L, at most 600 g/L, at most 700 g/L, at most 800 g/L, at most 900 g/L, or at most 1000 g/L of a mogrol precursor, mogrol, and/or mogroside. In some embodiments, a host cell comprising a lanosterol synthase is capable of producing between 0.01 mg/L and 1 mg/L, between 1 mg/L and 10 mg/L, between 10 mg/L and 20 mg/L, between 10 mg/L and 50 mg/L, between 50 mg/L and 100 mg/L, between 100 mg/L and 200 mg/L, between 200 mg/L and 300 mg/L, between 300 mg/L and 400 mg/L, between 400 mg/L and 500 mg/L, between 500 mg/L and 600 mg/L, between 600 mg/L and 700 mg/L, between 700 mg/L and 800 mg/L, between 800 mg/L and 900 mg/L, between 900 mg/L and 1000 mg/L, between 1 mg/L and 50 mg/L, between 1 mg/L and 100 mg/L, between 1 mg/L and 500 mg/L, between 1 mg/L and 1,000 mg/L, between 1 g/L and 10 g/L, between 10 g/L and 20 g/L, between 10 g/L and 50 g/L, between 50 g/L and 100 g/L, between 100 g/L and 200 g/L, between 200 g/L and 300 g/L, between 300 g/L and 400 g/L, between 400 g/L and 500 g/L, between 500 g/L and 600 g/L, between 600 g/L and 700 g/L, between 700 g/L and 800 g/L, between 800 g/L and 900 g/L, between 900 g/L and 1000 g/L, between 1 g/L and 50 g/L, between 1 g/L and 100 g/L, between 1 g/L and 500 g/L, or between 1 g/L and 1,000 g/L, including all values in between of a mogrol precursor, mogrol, and/or the mogroside. In some embodiments, the mogrol precursor is mevalonate. In some embodiments, the mogrol precursor is 2-3-oxidosqualene. In some embodiments, the mogrol precursor is cucurbitadienol.

[0100] In some embodiments, lanosterol is used as a readout of lanosterol synthase activity. For example, a lanosterol synthase with reduced activity may produce less lanosterol from 2-3-oxidosqualene relative to a control. In some embodiments, a control is a different lanosterol synthase. In some embodiments, a control is a wild-type lanosterol synthase. Lanosterol synthase activity may be determined using a cell lysate, a purified enzyme, or in a host cell.

[0101] In some embodiments, a lanosterol synthase is capable of decreasing production of lanosterol by a host cell by at least 0.01%, at least 0.05%, at least 1%, at least 5%, at least 10%, at least 15%, at least 20%, at least 25%, at least 30%, at least 35%, at least 40%, at least 45%, at least 50%, at least 55%, at least 60%, at least 65%, at least 70%, at least 75%, at least 80%, at least 85%, at least 90%, at least 95%, at least 100%, at least 150%, at least 200%, at least 250%, at least 300%, at least 350%, at least 400%, at least 450%, at least 500%, at least 550%, at least 600%, at least 650%, at least 700%, at least 750%, at least 800%, at least 850%, at least 900%, at least 950%, or at least 1000%, including all values in between as compared to production of lanosterol by a host cell that does not comprise the lanosterol synthase. In some embodiments, a lanosterol synthase is capable of decreasing production of lanosterol by a host cell at most 5%, at most 10%, at most 15%, at most 20%, at most 25%, at most 30%, at most 35%, at most 40%, at most 45%, at most 50%, at most 55%, at most 60%, at most 65%, at most 70%, at most 75%, at most 80%, at most 85%, at most 90%, at most 95%, at most 100%, at most 150%, at most 200%, at most 250%, at most 300%, at most 350%, at most 400%, at most 450%, at most 500%, at most 550%, at most 600%, at most 650%, at most 700%, at most 750%, at most 800%, at most 850%, at most 900%, at most 950%, or at most 1000%, including all values in between as compared to production of lanosterol by a host cell that does not comprise the lanosterol synthase. In some embodiments, a lanosterol synthase is capable of decreasing production of lanosterol by a host cell between 0.01% and 1%, between 1% and 10%, between 10% and 20%, between 10% and 50%, between 50% and 100%, between 100% and 200%, between 200% and 300%, between 300% and 400%, between 400% and 500%, between 500% and 600%, between 600% and 700%, between 700% and 800%, between 800% and 900%, between 900% and 1000%, between 1% and 50%, between 1% and 100%, between 1% and 500%, or between 1% and 1,000%, including all values in between as compared to production of lanosterol by a host cell that does not comprise the lanosterol synthase.

[0102] In some embodiments, lanosterol synthase activity in a host cell is determined by the level of ergosterol produced by a cell. Ergosterol is a fungal cell membrane sterol that is produced from lanosterol. Sec, e.g., Klug and Daum, FEMS Yeast Res. 2014 May; 14(3):369-88. In some embodiments, a host cell comprising a lanosterol synthase is capable of producing at most 5 mg/L, at most 10 mg/L, at most 15 mg/L, at most 20 mg/L, at most 25 mg/L, at most 30 mg/L, at most 35 mg/L, at most 40 mg/L, at most 45 mg/L, at most 50 mg/L, at most 55 mg/L, at most 60 mg/L, at most 65 mg/L, at most 70 mg/L, at most 75 mg/L, at most 80 mg/L, at most 85 mg/L, at most 90 mg/L, at most 95 mg/L, at most 100 mg/L, at most 150 mg/L, at most 200 mg/L, at most 250 mg/L, at most 300 mg/L, at most 350 mg/L, at most 400 mg/L, at most 450 mg/L, at most 500 mg/L, at most 550 mg/L, at most 600 mg/L, at most 650 mg/L, at most 700 mg/L, at most 750 mg/L, at most 800 mg/L, at most 850 mg/L, at most 900 mg/L, at most 950 mg/L, at most 1 g/L, at most 1.1 g/L, at most 1.2 g/L, at most 1.3 g/L, at most 1.4 g/L, at most 1.5 g/L, at most 1.6 g/L, at most 1.7 g/L, at most 1.8 g/L, at most 1.9 g/L, at most 2 g/L, at most 2.1 g/L, at most 2.2 g/L, at most 2.3 g/L, at most 2.4 g/L, at most 2.5 g/L, at most 2.6 g/L, at most 2.7 g/L, at most 2.8 g/L, at most 2.9 g/L, at most 3 g/L, at most 3.1 g/L, at most 3.2 g/L, at most 3.3 g/L, at most 3.4 g/L, at most 3.5 g/L, at most 3.6 g/L, at most 3.7 g/L, at most 3.8 g/L, at most 3.9 g/L, at most 4 g/L, at most 4.1 g/L, at most 4.2 g/L, at most 4.3 g/L, at most 4.4 g/L, at most 4.5 g/L, at most 4.6 g/L, at most 4.7 g/L, at most 4.8 g/L, at most 4.9 g/L, at most 5 g/L, at most 5.1 g/L, at most 5.2 g/L, at most 5.3 g/L, at most 5.4 g/L, at most 5.5 g/L, at most 5.6 g/L, at most 5.7 g/L, at most 5.8 g/L, at most 5.9 g/L, at most 6 g/L, at most 6.1 g/L, at most 6.2 g/L, at most 6.3 g/L, at most 6.4 g/L, at most 6.5 g/L, at most 6.6 g/L, at most 6.7 g/L, at most 6.8 g/L, at most 6.9 g/L, at most 7 g/L, at most 7.1 g/L, at most 7.2 g/L, at most 7.3 g/L, at most 7.4 g/L, at most 7.5 g/L, at most 7.6 g/L, at most 7.7 g/L, at most 7.8 g/L, at most 7.9 g/L, at most 8 g/L, at most 8.1 g/L, at most 8.2 g/L, at most 8.3 g/L, at most 8.4 g/L, at most 8.5 g/L, at most 8.6 g/L, at most 8.7 g/L, at most 8.8 g/L, at most 8.9 g/L, at most 9 g/L, at most 9.1 g/L, at most 9.2 g/L, at most 9.3 g/L, at most 9.4 g/L, at most 9.5 g/L, at most 9.6 g/L, at most 9.7 g/L, at most 9.8 g/L, at most 9.9 g/L, at most 10 g/L, at most 20 g/L, at most 30 g/L, at most 40 g/L, at most 50 g/L, at most 60 g/L, at most 70 g/L, at most 80 g/L, at most 90 g/L, at most 100 g/L, at most 200 g/L, at most 300 g/L, at most 400 g/L, at most 500 g/L, at most 600 g/L, at most 700 g/L, at most 800 g/L, at most 900 g/L, or at most 1000 g/L of ergosterol. In some embodiments, a lanosterol synthase is capable of producing between 0.01 mg/L and 1 mg/L, between 1 mg/L and 10 mg/L, between 10 mg/L and 20 mg/L, between 10 mg/L and 50 mg/L, between 50 mg/L and 100 mg/L, between 100 mg/L and 200 mg/L, between 200 mg/L and 300 mg/L, between 300 mg/L and 400 mg/L, between 400 mg/L and 500 mg/L, between 500 mg/L and 600 mg/L, between 600 mg/L and 700 mg/L, between 700 mg/L and 800 mg/L, between 800 mg/L and 900 mg/L, between 900 mg/L and 1000 mg/L, between 1 mg/L and 50 mg/L, between 1 mg/L and 100 mg/L, between 1 mg/L and 500 mg/L, between 1 mg/L and 1,000 mg/L, between 1 g/L and 10 g/L, between 10 g/L and 20 g/L, between 10 g/L and 50 g/L, between 50 g/L and 100 g/L, between 100 g/L and 200 g/L, between 200 g/L and 300 g/L, between 300 g/L and 400 g/L, between 400 g/L and 500 g/L, between 500 g/L and 600 g/L, between 600 g/L and 700 g/L, between 700 g/L and 800 g/L, between 800 g/L and 900 g/L, between 900 g/L and 1000 g/L, between 1 g/L and 50 g/L, between 1 g/L and 100 g/L, between 1 g/L and 500 g/L, or between 1 g/L and 1,000 g/L, including all values in between of ergosterol.

[0103] In some embodiments, a lanosterol synthase is capable of producing at most 5 mg/L, at most 10 mg/L, at most 15 mg/L, at most 20 mg/L, at most 25 mg/L, at most 30 mg/L, at most 35 mg/L, at most 40 mg/L, at most 45 mg/L, at most 50 mg/L, at most 55 mg/L, at most 60 mg/L, at most 65 mg/L, at most 70 mg/L, at most 75 mg/L, at most 80 mg/L, at most 85 mg/L, at most 90 mg/L, at most 95 mg/L, at most 100 mg/L, at most 150 mg/L, at most 200 mg/L, at most 250 mg/L, at most 300 mg/L, at most 350 mg/L, at most 400 mg/L, at most 450 mg/L, at most 500 mg/L, at most 550 mg/L, at most 600 mg/L, at most 650 mg/L, at most 700 mg/L, at most 750 mg/L, at most 800 mg/L, at most 850 mg/L, at most 900 mg/L, at most 950 mg/L, at most 1 g/L, at most 1.1 g/L, at most 1.2 g/L, at most 1.3 g/L, at most 1.4 g/L, at most 1.5 g/L, at most 1.6 g/L, at most 1.7 g/L, at most 1.8 g/L, at most 1.9 g/L, at most 2 g/L, at most 2.1 g/L, at most 2.2 g/L, at most 2.3 g/L, at most 2.4 g/L, at most 2.5 g/L, at most 2.6 g/L, at most 2.7 g/L, at most 2.8 g/L, at most 2.9 g/L, at most 3 g/L, at most 3.1 g/L, at most 3.2 g/L, at most 3.3 g/L, at most 3.4 g/L, at most 3.5 g/L, at most 3.6 g/L, at most 3.7 g/L, at most 3.8 g/L, at most 3.9 g/L, at most 4 g/L, at most 4.1 g/L, at most 4.2 g/L, at most 4.3 g/L, at most 4.4 g/L, at most 4.5 g/L, at most 4.6 g/L, at most 4.7 g/L, at most 4.8 g/L, at most 4.9 g/L, at most 5 g/L, at most 5.1 g/L, at most 5.2 g/L, at most 5.3 g/L, at most 5.4 g/L, at most 5.5 g/L, at most 5.6 g/L, at most 5.7 g/L, at most 5.8 g/L, at most 5.9 g/L, at most 6 g/L, at most 6.1 g/L, at most 6.2 g/L, at most 6.3 g/L, at most 6.4 g/L, at most 6.5 g/L, at most 6.6 g/L, at most 6.7 g/L, at most 6.8 g/L, at most 6.9 g/L, at most 7 g/L, at most 7.1 g/L, at most 7.2 g/L, at most 7.3 g/L, at most 7.4 g/L, at most 7.5 g/L, at most 7.6 g/L, at most 7.7 g/L, at most 7.8 g/L, at most 7.9 g/L, at most 8 g/L, at most 8.1 g/L, at most 8.2 g/L, at most 8.3 g/L, at most 8.4 g/L, at most 8.5 g/L, at most 8.6 g/L, at most 8.7 g/L, at most 8.8 g/L, at most 8.9 g/L, at most 9 g/L, at most 9.1 g/L, at most 9.2 g/L, at most 9.3 g/L, at most 9.4 g/L, at most 9.5 g/L, at most 9.6 g/L, at most 9.7 g/L, at most 9.8 g/L, at most 9.9 g/L, at most 10 g/L, at most 20 g/L, at most 30 g/L, at most 40 g/L, at most 50 g/L, at most 60 g/L, at most 70 g/L, at most 80 g/L, at most 90 g/L, at most 100 g/L, at most 200 g/L, at most 300 g/L, at most 400 g/L, at most 500 g/L, at most 600 g/L, at most 700 g/L, at most 800 g/L, at most 900 g/L, or at most 1000 g/L of ergosterol.

[0104] In some embodiments, a lanosterol synthase is capable of producing between 0.01 mg/L and 1 mg/L, between 1 mg/L and 10 mg/L, between 10 mg/L and 20 mg/L, between 10 mg/L and 50 mg/L, between 50 mg/L and 100 mg/L, between 100 mg/L and 200 mg/L, between 200 mg/L and 300 mg/L, between 300 mg/L and 400 mg/L, between 400 mg/L and 500 mg/L, between 500 mg/L and 600 mg/L, between 600 mg/L and 700 mg/L, between 700 mg/L and 800 mg/L, between 800 mg/L and 900 mg/L, between 900 mg/L and 1000 mg/L, between 1 mg/L and 50 mg/L, between 1 mg/L and 100 mg/L, between 1 mg/L and 500 mg/L, between 1 mg/L and 1,000 mg/L, between 1 g/L and 10 g/L, between 10 g/L and 20 g/L, between 10 g/L and 50 g/L, between 50 g/L and 100 g/L, between 100 g/L and 200 g/L, between 200 g/L and 300 g/L, between 300 g/L and 400 g/L, between 400 g/L and 500 g/L, between 500 g/L and 600 g/L, between 600 g/L and 700 g/L, between 700 g/L and 800 g/L, between 800 g/L and 900 g/L, between 900 g/L and 1000 g/L, between 1 g/L and 50 g/L, between 1 g/L and 100 g/L, between 1 g/L and 500 g/L, or between 1 g/L and 1,000 g/L, including all values in between of ergosterol.

### Acetoacetyl COA Synthases

[0105] Aspects of the present invention provide acetoacetyl COA synthases, which catalyze the condensation of acetyl-CoA and malonyl-CoA to form acetoacetyl-CoA and CoA, but do not accept malonyl-[acyl-carrier-protein] as a substrate. Acetoacetyl CoA synthases can also convert malonyl-CoA into acetyl-CoA via decarboxylation of malonyl-CoA. Aspects of the present invention provide an acetoacetyl COA synthase which increases levels of acetoacetyl-CoA, which is a precursor in a pathway to produce 2,3-oxidosqualene.

[0106] In some embodiments, the acetoacetyl COA synthase is encoded by a NphT7 gene. NphT7 catalyzes an alternative path to acetoacetyl-CoA and is present in the mevalonate (MEV) pathway from Saccharomyces cerevisiae. See, e.g., FIG. 1A. In some embodiments, the acetoacetyl COA synthase comprises the amino acid sequence:

(SEQ ID NO: 6)
MTDVRFRIIGTGAYVPERIVSNDEVGAPAGVDDDWITRKTGIRQRRWAAD
DQATSDLATAAGRAALKAAGITPEQLTVIAVATSTPDRPQPPTAAYVQHH
LGATGTAAFDVNAVCSGTVFALSSVAGTLVYRGGYALVIGADLYSRILNP
ADRKTVVLFGDGAGAMVLGPTSTGTGPIVRRVALHTFGGLTDLIRVPAGG
SRQPLDTDGLDAGLQYFAMDGREVRRFVTEHLPQLIKGFLHEAGVDAADI
SHFVPHQANGVMLDEVFGELHLPRATMHRTVETYGNTGAASIPITMDAAV
RAGSFRPGELVLLAGFGGGMAASFALIEW.

[0107] In some embodiments, an acetoacetyl COA synthase comprising SEQ ID NO: 6 is encoded by a polynucleotide having a sequence of:

(SEQ ID NO: 7)
ATGACCGACGTCCGATTCCGAATTATCGGTACTGGTGCCTACGTTCCCGA
ACGAATCGTTTCCAACGATGAAGTCGGTGCTCCTGCCGGTGTTGACGACG
ACTGGATCACCCGAAAGACCGGTATTCGACAGCGACGATGGGCTGCCGAT
GACCAGGCCACCTCTGATCTGGCCACTGCTGCCGGTCGAGCTGCCCTGAA
GGCCGCTGGTATCACTCCCGAGCAGCTGACCGTTATTGCTGTTGCCACCT
CCACTCCCGATCGACCCCAGCCTCCCACTGCTGCCTATGTTCAGCACCAC
CTCGGAGCCACCGGTACTGCTGCCTTCGACGTCAACGCTGTCTGCTCCGG
TACCGTTTTCGCCCTGTCCTCTGTTGCTGGCACCCTCGTTTACCGAGGTG
GTTACGCTCTGGTCATTGGCGCTGACCTGTACTCTCGAATCCTCAACCCT
GCCGACCGAAAGACCGTCGTTCTGTTCGGTGATGGTGCCGGTGCCATGGT
TCTCGGTCCTACCTCCACCGGTACTGGTCCCATTGTTCGACGAGTTGCCC
TGCACACCTTCGGTGGTCTGACCGACCTGATTCGAGTCCCCGCTGGTGGT
TCTCGACAGCCCCTGGACACTGATGGCCTCGATGCTGGACTGCAGTACTT
CGCTATGGACGGTCGTGAGGTCCGACGATTCGTCACTGAGCACCTCCCCC
AGCTGATCAAGGGTTTCCTGCACGAGGCCGGTGTCGACGCTGCCGACATC
TCTCACTTCGTCCCTCATCAGGCCAACGGTGTCATGCTCGACGAGGTCTT
CGGCGAGCTGCATCTGCCTCGAGCTACCATGCACCGAACTGTCGAGACTT
ACGGCAACACCGGAGCTGCCTCCATTCCCATCACCATGGACGCTGCCGTT
CGAGCCGGTTCCTTCCGACCTGGTGAGCTGGTCCTGCTGGCCGGTTTCGG
TGGCGGTATGGCCGCTTCCTTCGCCCTGATCGAGTGGTAG.

[0108] Acetoacetyl COA synthases of the present disclosure may comprise a sequence that is at least 5%, at least 10%, at least 15%, at least 20%, at least 25%, at least 30%, at least 35%, at least 40%, at least 45%, at least 50%, at least 55%, at least 60%, at least 65%, at least 70%, at least 71%, at least 72%, at least 73%, at least 74%, at least 75%, at least 76%, at least 77%, at least 78%, at least 79%, at least 80%, at least 81%, at least 82%, at least 83%, at least 84%, at least 85%, at least 86%, at least 87%, at least 88%, at least 89%, at least 90%, at least 91%, at least 92%, at least 93%, at least 94%, at least 95%, at least 96%, at least 97%, at least 98%, at least 99%, or at least 100% identical, including all values in between, with the acetoacetyl CoA synthase sequence set forth as SEQ ID NO: 6 or 7, or to any acetoacetyl CoA synthase sequence disclosed in this application or known in the art. The present disclosure also pertains to a host cell comprising such an acetoacetyl COA synthase, polynucleotides encoding such an acetoacetyl COA synthase, and/or methods of use of such a host cell.

[0109] In some embodiments, an acetoacetyl CoA synthase of the present disclosure is capable of promoting formation of acetoacetyl-CoA.

[0110] Activity, such as specific activity, of a recombinant acetoacetyl CoA synthase may be measured as the concentration of acetoacetyl-CoA produced per unit of enzyme per unit of time. In some embodiments, an acetoacetyl CoA synthase of the present disclosure has an activity, such as specific activity, of at least 0.0000001 μmol/min/mg (e.g., at least 0.000001 μmol/min/mg, at least 0.00001 μmol/min/mg, at least 0.0001 μmol/min/mg, at least 0.001 μmol/min/mg, at least 0.01 μmol/min/mg, at least 0.1 μmol/min/mg, at least 1 μmol/min/mg, at least 10 μmol/min/mg, or at least 100 μmol/min/mg, including all values in between).

[0111] In some embodiments, the activity, such as specific activity, of an acetoacetyl CoA synthase is at least 1.1 fold (e.g., at least 1.3 fold, at least 1.5 fold, at least 1.7 fold, at least 1.9 fold, at least 2 fold, at least 2.5 fold, at least 3 fold, at least 4 fold, at least 5 fold, at least 10 fold, at least 20 fold, at least 30 fold, at least 40 fold, at least 50 fold, or at least 100 fold, including all values in between) greater than that of a control acetoacetyl CoA synthase.

[0112] In various aspects, the present disclosure pertains to: an acetoacetyl COA synthase as provided in SEQ ID NO: 6; a polynucleotide encoding an acetoacetyl CoA synthase as provided in SEQ ID NO: 7; a host cell comprising an acetoacetyl COA synthase as provided in SEQ ID NO: 6; or a host cell comprising a polynucleotide encoding an acetoacetyl CoA synthase as provided in SEQ ID NO: 7. In some aspects, the present disclosure pertains to: a method of making a compound of interest, wherein the compound of interest is a mogrol, a mogrol precursor, a mogroside, or a mogroside precursor, wherein the method comprises the step of: producing the compound of interest in a host cell comprising an acetoacetyl CoA synthase as provided in SEQ ID NO: 6, and/or a polynucleotide encoding an acetoacetyl CoA synthase as provided in SEQ ID NO: 7.

### UDP-Glycosyltransferases (UGT) Enzymes

[0113] Aspects of the present disclosure provide UDP-glycosyltransferase enzymes (UGTs), which may be useful, for example, in the production of a mogroside (e.g., mogroside I-A1 (MIA1), mogroside I-E (MIE), mogroside II-A1 (MIIA1), mogroside II-A2 (MIIA2), mogroside III-A1 (MIIIA1), mogroside II-E (MIIE), mogroside III (MIII), siamenoside I, mogroside III-E (MIIIE), mogroside IV, mogroside IVa, isomogroside IV, mogroside V, mogroside VIA (MVIA), mogroside VIB (MVIB), isomogroside V, mogroside VIa1 (MVIa1), or mogroside VI).

[0114] As used in this disclosure, a “UGT” refers to an enzyme that is capable of catalyzing the addition of the glycosyl group from a UTP-sugar to a compound (e.g., mogroside or mogrol). A UGT may be a primary and/or a secondary UGT.

[0115] A “primary” UGT, or a UGT that has “primary glycosylation activity,” refers to a UGT that is capable of catalyzing the addition of a glycosyl group to a position on a compound that does not comprise a glycosyl group. For example, a primary UGT may be capable of adding a glycosyl group to the C3 and/or C24 position of an isoprenoid substrate (e.g., mogrol). Sec, e.g., FIG. 1E.

[0116] A “secondary” UGT, or a UGT that has “secondary glycosylation activity,” refers to a UGT that is capable of catalyzing the addition of a glycosyl group to a position on a compound that already comprises a glycosyl group. See, e.g., FIG. 1F. As a non-limiting example, a secondary UGT may add a glycosyl group to a mogroside I-A1 (MIA1), mogroside I-E (MIE), mogroside II-A1 (MIIA1), mogroside II-A2 (MIIA2), mogroside III-A1 (MIIIA1), mogroside II-E (MIIE), mogroside III (MIII), siamenoside I, mogroside III-E (MIIIE), mogroside IV, mogroside IVa, isomogroside IV, mogroside V, mogroside VIA (MVIA), mogroside VIB (MVIB), isomogroside V, mogroside VIa1 (MVIa1), and/or mogroside VI.

[0117] In some embodiments, a UGT (e.g., primary or secondary UGT) of the present disclosure comprises a sequence (e.g., nucleic acid or amino acid sequence) that is at least 5%, at least 10%, at least 15%, at least 20%, at least 25%, at least 30%, at least 35%, at least 40%, at least 45%, at least 50%, at least 55%, at least 60%, at least 65%, at least 70%, at least 71%, at least 72%, at least 73%, at least 74%, at least 75%, at least 76%, at least 77%, at least 78%, at least 79%, at least 80%, at least 81%, at least 82%, at least 83%, at least 84%, at least 85%, at least 86%, at least 87%, at least 88%, at least 89%, at least 90%, at least 91%, at least 92%, at least 93%, at least 94%, at least 95%, at least 96%, at least 97%, at least 98%, at least 99%, or 100% identical, including all values in between, to any UGT sequence disclosed in this application or known in the art.

[0118] The UGTs of the present disclosure may be capable of glycosylating mogrol or a mogroside at any of the oxygenated sites (e.g., at C3, C11, C24, and C25). In some embodiments, the UGT is capable of branching glycosylation (e.g., branching glycosylation of a mogroside at C3 or C24).

[0119] Non-limiting examples of suitable substrates for the UGTs of the present disclosure include mogrol and mogrosides (e.g., mogroside IA1 (MIA1), mogroside IE (MIE), mogroside II-A1 (MIIA1), mogroside III-A1 (MIIIA1), mogroside II-E (MIIE), mogroside III (MIII), or mogroside III-E (MIIIE), siamenoside I).

[0120] In some embodiments, the UGTs of the present disclosure are capable of producing mogroside IA1 (MIA1), mogroside IE (MIE), mogroside II-A1 (MIIA1), mogroside II-A2 (MIIA2), mogroside III-A1 (MIIIA1), mogroside II-E (MIIE), mogroside III (MIII), siamenoside I, mogroside III-E (MIIIE), mogroside IV, mogroside IVa, isomogroside IV, mogroside VIA (MVIA), mogroside VIB (MVIB), isomogroside V, mogroside VIa1 (MVIa1), and/or mogroside V.

[0121] In some embodiments, the UGT is capable of catalyzing the conversion of mogrol to MIA1; mogrol to MIE1; MIA1 to MIIA1; MIE1 to MIIE; MIIA1 to MIIIA1; MIA1 to MIIE; MIIA1 to MIII; MIIIA1 to siamenoside I; MIIE to MIII; MIII to siamenoside I; MIIE to MIIE; and/or MIIIE to siamenoside I.

[0122] It should be appreciated that activity, such as specific activity, of a UGT can be measured by any means known to one of ordinary skill in the art. In some embodiments, the activity, such as specific activity, of a UGT may be determined by measuring the amount of glycosylated mogroside produced per unit enzyme per unit time. For example, the activity, such as specific activity, may be measured in mmol glycosylated mogroside target produced per gram of enzyme per hour. In some embodiments, a UGT of the present disclosure may have an activity, such as specific activity, of at least 0.1 mmol (e.g., at least 1 mmol, at least 1.5 mmol, at least 2 mmol, at least 2.5 mmol, at least 3, at least 3.5 mmol, at least 4 mmol, at least 4.5 mmol, at least 5 mmol, at least 10 mmol, including all values in between) glycosylated mogroside target produced per gram of enzyme per hour.

[0123] In some embodiments, the activity, such as specific activity, of a UGT of the present disclosure is at least 1.1 fold (e.g., at least 1.3 fold, at least 1.5 fold, at least 1.7 fold, at least 1.9 fold, at least 2 fold, at least 2.5 fold, at least 3 fold, at least 4 fold, at least 5 fold, at least 10 fold, at least 20 fold, at least 30 fold, at least 40 fold, at least 50 fold, or at least 100 fold, including all values in between) greater than that of a control UGT. In some embodiments, the control UGT is a primary UGT. In some embodiments, the control UGT is a secondary UGT. In some embodiments, the control UGT is UGT94-289-1 (a wildtype UGT sequence from the monk fruit Siraitia grosvenorii provided by SEQ ID NO: 121). In some embodiments, for a UGT that has an amino acid substitution, a control UGT is the same UGT but without the amino acid substitution.

[0124] It should be appreciated that one of ordinary skill in the art would be able to characterize a protein as a UGT enzyme based on structural and/or functional information associated with the protein. For example, a protein can be characterized as a UGT enzyme based on its function, such as the ability to produce one or more mogrosides in the presence of a mogroside precursor, such as mogrol.

[0125] A UGT enzyme can be further characterized as a primary UGT based on its function of catalyzing the addition of a glycosyl group to a position on a compound that does not comprise a glycosyl group. A UGT enzyme can be characterized as a secondary UGT based on its function of catalyzing the addition of a glycosyl group to a position on a compound that already comprises a glycosyl group. In some embodiments, a UGT enzyme can be characterized as a both primary and a secondary UGT enzyme.

[0126] In other embodiments, a protein can be characterized as a UGT enzyme based on the percent identity between the protein and a known UGT enzyme. For example, the protein may be at least 10%, 15%, 20%, 25%, 30%, 35%, 40%, 45%, 50%, 55%, 60%, 65%, 70%, 75%, 80%, 85%, 90%, 91%, 92%, 93%, 94%, 95%, 96%, 97%, 98%, 99%, or 100% identical, including all values in between, to any of the UGT sequences described in this application or the sequence of any other UGT enzyme.

[0127] In other embodiments, a protein can be characterized as a UGT enzyme based on the presence of one or more domains in the protein that are associated with UGT enzymes. For example, in certain embodiments, a protein is characterized as a UGT enzyme based on the presence of a sugar binding domain and/or a catalytic domain, characteristic of UGT enzymes known in the art. In certain embodiments, the catalytic domain binds the substrate to be glycosylated.

[0128] In other embodiments, a protein can be characterized as a UGT enzyme based on a comparison of the three-dimensional structure of the protein compared to the three-dimensional structure of a known UGT enzyme. For example, a protein could be characterized as a UGT based on the number or position of alpha helical domains, beta-sheet domains, etc. It should be appreciated that a UGT enzyme can be a synthetic protein.

[0129] Structurally, UGTs often comprise a UDPGT (Prosite: PS00375) domain and a catalytic dyad. As a non-limiting example, one of ordinary skill in the art may identify a catalytic dyad in a UGT by aligning the UGT sequence to UGT94-289-1 and identifying the two residues in the UGT that correspond to histidine 21 (H21) and aspartate 122 (D122) of UGT94-289-1.

[0130] The amino acid sequence for UGT94-289-1 is:

(SEQ ID NO: 121)
MDAQRGHTTTILMFPWLGYGHLSAFLELAKSLSRRNFHIYFCSTSVNLDA
IKPKLPSSSSSDSIQLVELCLPSSPDQLPPHLHTTNALPPHLMPTLHQAF
SMAAQHFAAILHTLAPHLLIYDSFQPWAPQLASSLNIPAINFNTTGASVL
TRMLHATHYPSSKFPISEFVLHDYWKAMYSAAGGAVTKKDHKIGETLANC
LHASCSVILINSFRELEEKYMDYLSVLLNKKVVPVGPLVYEPNQDGEDEG
YSSIKNWLDKKEPSSTVFVSFGSEYFPSKEEMEEIAHGLEASEVHFIWVV
RFPQGDNTSAIEDALPKGFLERVGERGMVVKGWAPQAKILKHWSTGGFVS
HCGWNSVMESMMFGVPIIGVPMHLDQPFNAGLAEEAGVGVEAKRDPDGKI
QRDEVAKLIKEVVVEKTREDVRKKAREMSEILRSKGEEKMDEMVAAISLF
LKI.

[0131] A non-limiting example of a nucleic acid sequence encoding UGT94-289-1 is:

(SEQ ID NO: 60)
atggacgcgcaacgcggacatacgactaccatcctgatgtttccgtggtt
ggggtacggccaccttagtgcattcctcgaattagccaagagcttgtcgc
gtaggaactttcatatttatttctgttccacatctgtcaatttagatgct
ataaaacccaaactaccatcatcttcaagttccgattctattcagcttgt
agagttatgcttgccttcctcgccagaccaactacccccacacctgcata
caactaatgctctacctccacatctaatgcctaccctgcaccaggccttt
tcaatggcagctcaacattttgcagctatattacatactttagcaccgca
cttgttaatctatgattcgttccagccttgggcgccacaattggccagct
ctcttaacattcctgctattaattttaataccacgggtgccagtgtgcta
acaagaatgttacacgcgactcattacccatcttcaaagttcccaatctc
cgaatttgttttacatgattattggaaagcaatgtattcagcagctggtg
gtgctgttacaaaaaaggaccataaaataggagaaaccttggcaaactgt
ttacacgcttcttgctcggtaattctgatcaattcattcagagagttgga
agaaaaatacatggattacttgtctgtcttactaaacaagaaagttgtgc
ccgtgggtccgcttgtttatgagccaaaccaagatggcgaagacgaaggt
tatagttcgataaagaattggctcgataaaaaggagccctcctcaactgt
ctttgtttccttcgggtccgaatattttccgtccaaagaagaaatggaag
aaattgcccatggcttggaggctagcgaggtacactttatttgggtcgtt
agattcccacaaggagacaatacttctgcaattgaagatgcccttcctaa
gggttttcttgagcgagtgggcgaacgtggaatggtggttaagggttggg
ctcctcaggccaaaattttgaaacattggagcacaggcggtttcgtaagt
cattgtggatggaatagtgttatggagagcatgatgtttggtgtacccat
aataggtgttccgatgcatttagatcaaccatttaatgcagggctcgcgg
aagaagcaggagtaggggtagaggctaaaagggaccctgatggtaagata
cagagagatgaagtcgctaaactgatcaaagaagtggttgtcgaaaaaac
gcgcgaagatgtcagaaagaaggctagggaaatgtctgaaattttacgtt
cgaaaggtgaggaaaagatggacgagatggttgcagccattagtctcttc
ttgaagatataa.

[0132] One of ordinary skill in the art would readily recognize how to determine for any UGT enzyme what amino acid residue corresponds to a specific amino acid residue in a reference UGT such as UGT94-289-1 (SEQ ID NO: 121) by, for example, aligning sequences and/or by comparing secondary or tertiary structures.

[0133] In certain embodiments, a UGT of the present disclosure comprises one or more structural motifs corresponding to a structural motif in wild-type UGT94-289-1 (e.g., corresponding to a structural motif that is shown in Table 1). In some embodiments, a UGT comprises structural motifs corresponding to all structural motifs in Table 1. In some embodiments, a UGT comprises a structural motif that corresponds to some but not all structural motifs shown in Table 1. In some embodiments, some structural motifs may diverge by having different lengths or different helicity. For example, a UGT of the present disclosure may comprise extended versions of loops 11, 16, 20, or a combination thereof. A UGT of the present disclosure may comprise loops that have greater helicity than their counterpart in UGT94-289-1 (e.g., loops 11, 16, 20, or a combination thereof in UGT94-289-1).

TABLE 1
Non-limiting Examples of Structural Motifs in
Reference Sequence UGT94-289-1 (SEQ ID NO: 121)

| | | | SEQ |
|---|---|---|---|
| Structural Motif | Borders | Sequence | ID NO |
| Loop 1 | Met1-Thr9 | MDAQRGHTT | 122 |
| Beta Sheet 1 | Thr10-Phe14 | TILMF | 123 |
| Loop 2 | Pro15-Gly18 | PWLG | 124 |
| Alpha Helix 1 | Tyr19-Arg34 | YGHLSAFLELAKSLSR | 125 |
| Loop3 | Arg35-Phe37 | RNF | 126 |
| Beta Sheet 2 | His38-Phe41 | HIYF | 127 |
| Loop 4 | Cys42-Thr44 | CST | 128 |
| Alpha Helix 2 | Ser45-Ala50 | SVNLDA | 129 |
| Loop 5 | Ile51-Ser61 | IKPKLPSSSSS | 130 |
| Beta Sheet 3 | Asp62-Gln65 | DSIQ | 131 |
| Loop 6 | Leu66-Leu88 | LVELCLPSSPDQLPPHLHTTNAL | 132 |
| Alpha Helix 3 | Pro89-Ala109 | PPHLMPTLHQAFSMAAQHFAA | 133 |
| Loop 7 | Ile110-His117 | ILHTLAPH | 134 |
| Beta Sheet 4 | Leu118-Asp122 | LLIYD | 135 |
| Loop 8 | Ser123-Pro126 | SFQP | 136 |
| Alpha Helix 4 | Trp127-Leu134 | WAPQLASSL | 137 |
| Loop 9 | Asn135-Pro137 | NIP | 138 |
| Beta Sheet 5 | Ala138-Asn143 | AINFN | 139 |
| Loop 10 | Thr144-Gly146 | TTG | 140 |
| Alpha Helix 5 | Ala147-His158 | ASVLTRMLHATH | 141 |
| Loop 11 | Tyr159-Tyr179 | YPSSKFPISEFVLHDYWKAMY | 142 |
| Alpha Helix 6 | Ser180-Gly183 | SAAG | 143 |
| Loop 12 | Gly184-Lys189 | GAVTKK | 144 |
| Alpha Helix 7 | Asp190-Ser204 | DHKIGETLANCLHAS | 145 |
| Loop 13 | Cys205-Ser206 | CS | 146 |
| Beta Sheet 6 | Val207-Ile210 | VILI | 147 |
| Loop 14 | Asn211-Glu217 | NSFRELE | 148 |
| Alpha Helix 8 | Glu218-Leu227 | EKYMDYLSVL | 149 |
| Loop 15 | Leu228-Asn229 | LN | 150 |
| Beta Sheet 7 | Lys230-Val232 | KKV | 151 |
| Loop 16 | Val233-Ser252 | VPVGPLVYEPNQDGEDEGYS | 152 |
| Alpha Helix 9 | Ser253-Lys261 | SIKNWLDKK | 153 |
| Loop 17 | Glu262-Ser265 | EPSS | 154 |
| Beta Sheet 8 | Thr266-Ser270 | TVFVS | 155 |
| Loop 18 | Phe271-Ser278 | FGSEYFPS | 156 |
| Alpha Helix 10 | Lys279-Ser292 | KEEMEEIAHGLEAS | 157 |
| Loop 19 | Glu293-His295 | EVH | 158 |
| Beta Sheet 9 | Phe296-Val300 | FIWVV | 159 |
| Alpha Helix 11 | Arg301-Asn307 | RFPQGDN | 160 |
| Loop 20 | Thr308-Gly318 | TSAIEDALPKG | 161 |
| Alpha Helix 12 | Phe319-Val323 | FLERV | 162 |
| Loop 21 | Gly324-Gly327 | GERG | 163 |
| Beta Sheet 10 | Met328-Lys331 | MVVK | 164 |
| Loop 22 | Gly332-Pro335 | GWAP | 165 |
| Alpha Helix 13 | Gln336-Lys341 | QAKILK | 166 |
| Loop 23 | His342-Gly346 | HWSTG | 167 |
| Beta Sheet 11 | Gly347-Ser350 | GFVS | 168 |
| Loop 24 | His351-Gly353 | HCG | 169 |
| Alpha Helix 14 | Trp354-Phe363 | WNSVMESMMF | 170 |
| Loop 25 | Gly364-Pro366 | GVP | 171 |
| Beta Sheet 12 | Ile367-Val370 | IIGV | 172 |
| Loop 26 | Pro371-Leu374 | PMHL | 173 |
| Alpha Helix 15 | Asp375-Ala386 | DQPFNAGLAEEA | 174 |
| Loop 27 | Gly387-Val388 | GV | 175 |
| Beta Sheet 13 | Gly389-Glu391 | GVE | 176 |
| Loop 28 | Ala392-Gln401 | AKRDPDGKIQ | 177 |
| Alpha Helix 16 | Arg402-Val414 | RDEVAKLIKEVVV | 178 |
| Loop 29 | Glu415 | E | 179 |
| Alpha Helix 17 | Lys416-Gly436 | KTREDVRKKAREMSEILRSKG | 180 |
| Loop 30 | Glu437-Met440 | EEKM | 181 |
| Alpha Helix 18 | Asp441-Leu451 | DEMVAAISLFL | 182 |
| Loop 31 | Lys452-Ile453 | KI | 183 |

[0134] In some embodiments, a UGT is a circularly permutated version of a reference UGT. In some embodiments, a UGT comprises a sequence that includes at least two motifs from Table 1 in a different order than a reference UGT. For example, if a reference UGT comprises a first motif that is located C-terminal to a second motif, the first motif may be located N-terminal to the second motif in a circularly permutated UGT.

[0135] A UGT may comprise one or more motifs selected from Loop 1, Beta Sheet 1, Loop 2, Alpha Helix 1, Loop 3, Beta Sheet 2, Loop 4, Alpha Helix 2, Loop 5, Beta Sheet 3, Loop 6, Alpha Helix 3, Loop 7, Beta Sheet 4, Loop 8, Alpha Helix 4, Loop 9, Beta Sheet 5, Loop 10, Alpha Helix 5, Loop 11, Alpha Helix 6, Loop 12, Alpha Helix 7, Loop 13, Beta Sheet 6, Loop 14, Alpha Helix 8, and Loop 15 from Table 1 located C-terminal to one or more motifs corresponding to one or more motifs selected from Beta Sheet 7, Loop 16, Alpha Helix 9, Loop 17, Beta Sheet 8, Loop 18, Alpha Helix 10, Loop 19, Beta Sheet 9, Alpha Helix 11, Loop 20, Alpha Helix 12, Loop 21, Beta Sheet 10, Loop 22, Alpha Helix 13, Loop 23, Beta Sheet 11, Loop 24, Alpha Helix 14, Loop 25, Beta Sheet 12, Loop 26, Alpha Helix 15, Loop 27, Beta Sheet 13, Loop 28, Alpha Helix 16, Loop 29, Alpha Helix 17, Loop 30, Alpha Helix 18, and Loop 31 in Table 1.

[0136] In some embodiments, the N-terminal portion of a UGT comprises a catalytic site, including a catalytic dyad, and/or a substrate-binding site. In some embodiments, the C-terminal portion of a UGT comprises a cofactor-binding site. Aspects of the disclosure include UGTs that have been circularly permutated. In some embodiments, in a circularly permutated version of a UGT, the N-terminal portion and the C-terminal portions may be reversed in whole or in part. For example, the C-terminal portion of a circularly permutated UGT may comprise a catalytic site, including a catalytic dyad, and/or a substrate-binding site, while the N-terminal portion may comprise a cofactor-binding site. In some embodiments, a circularly permutated version of a UGT comprises a heterologous polynucleotide encoding a UGT, wherein the UGT comprises: a catalytic dyad and a cofactor binding site, wherein the catalytic dyad is located C-terminal to the cofactor-binding site.

[0137] A circularly permutated UGT encompassed by the disclosure may exhibit different properties from the same UGT that has not undergone circular permutation. In some embodiments, a host cell expressing such a circularly permutated version of a UGT produces in the presence of at least one mogroside precursor at least 10%, 20%, 30%, 40%, 50%, 60%, 70%, 80%, 90%, or 100% more of one or more mogrosides relative to a host cell that comprises a heterologous polynucleotide encoding a reference UGT that is not circularly permutated, such as wild-type UGT94-289-1 (SEQ ID NO: 121). In some embodiments, a host cell expressing such a circularly permutated version of a UGT produces in the presence of at least one mogroside precursor at least 10%, 20%, 30%, 40%, 50%, 60%, 70%, 80%, 90%, or 100% less of one or more mogrosides relative to a host cell that comprises a heterologous polynucleotide encoding a reference UGT that is not circularly permutated, such as wild-type UGT94-289-1 (SEQ ID NO: 121).

### Cucurbitadienol Synthase (CDS) Enzymes

[0138] Aspects of the present disclosure provide cucurbitadienol synthase (CDS) enzymes, which may be useful, for example, in the production of a cucurbitadienol compound, such as 24-25 epoxy-cucurbitadienol or cucurbitadienol. CDSs are capable of catalyzing the formation of cucurbitadienol compounds, such as 24-25 epoxy-cucurbitadienol or cucurbitadienol from oxidosqualene (e.g., 2-3-oxidosqualene or 2,3; 22,23-diepoxysqualene).

[0139] In some embodiments, CDSs have a leucine at a residue corresponding to position 123 of SEQ ID NO: 256 that distinguishes them from other oxidosqualene cyclases, as discussed in Takase et al. Org. Biomol. Chem., 2015, 13, 7331-7336, which is incorporated by reference in its entirety.

[0140] CDSs of the present disclosure may comprise a sequence that is at least 5%, at least 10%, at least 15%, at least 20%, at least 25%, at least 30%, at least 35%, at least 40%, at least 45%, at least 50%, at least 55%, at least 60%, at least 65%, at least 70%, at least 71%, at least 72%, at least 73%, at least 74%, at least 75%, at least 76%, at least 77%, at least 78%, at least 79%, at least 80%, at least 81%, at least 82%, at least 83%, at least 84%, at least 85%, at least 86%, at least 87%, at least 88%, at least 89%, at least 90%, at least 91%, at least 92%, at least 93%, at least 94%, at least 95%, at least 96%, at least 97%, at least 98%, at least 99%, or 100% identical, including all values in between, to a nucleic acid or amino acid sequence in Table 12, to a sequence selected from SEQ ID NO: 184-263, 299, 308, 327, or 332, or to any other CDS sequence disclosed in this application or known in the art.

[0141] In some embodiments a CDS enzyme corresponds to AquAgaCDS16 (SEQ ID NO: 226), CSPI06G07180.1 (SEQ ID NO: 235), or A0A1S3CBF6 (SEQ ID NO: 232). In some embodiments a CDS enzyme corresponds to SgCDS1 (SEQ ID NO: 256).

[0142] In some embodiments, a nucleic acid sequence encoding a CDS enzyme may be codon optimized for expression in a particular host cell, including S. cerevisiae. In some embodiments, a codon-optimized nucleic acid sequence encoding a CDS enzyme corresponds to SEQ ID NO: 186, 195, 192, or 327. In some embodiments, a codon-optimized nucleic acid sequence encoding a CDS enzyme corresponds to SEQ ID NO: 332.

[0143] In some embodiments, a CDS of the present disclosure is capable of using oxidosqualene (e.g., 2,3-oxidosqualene or 2,3; 22,23-diepoxysqualene) as a substrate. In some embodiments, a CDS of the present disclosure is capable of producing cucurbitadienol compounds (e.g., 24-25 epoxy-cucurbitadienol or cucurbitadienol). In some embodiments, a CDS of the present disclosure catalyzes the formation of cucurbitadienol compounds (e.g., 24-25 epoxy-cucurbitadienol or cucurbitadienol) from oxidosqualene (e.g., 2-3-oxidosqualene or 2,3; 22,23-diepoxysqualene).

[0144] It should be appreciated that activity of a CDS can be measured by any means known to one of ordinary skill in the art. In some embodiments, the activity of a CDS may be measured as the normalized peak area of cucurbitadienol produced. In some embodiments, this activity is measured in arbitrary units. In some embodiments, the activity, such as specific activity, of a CDS of the present disclosure is at least 1.1 fold (e.g., at least 1.3 fold, at least 1.5 fold, at least 1.7 fold, at least 1.9 fold, at least 2 fold, at least 2.5 fold, at least 3 fold, at least 4 fold, at least 5 fold, at least 10 fold, at least 20 fold, at least 30 fold, at least 40 fold, at least 50 fold, or at least 100 fold, including all values in between) greater than that of a control CDS.

[0145] It should be appreciated that one of ordinary skill in the art would be able to characterize a protein as a CDS enzyme based on structural and/or functional information associated with the protein. For example, in some embodiments, a protein can be characterized as a CDS enzyme based on its function, such as the ability to produce cucurbitadienol compounds (e.g., 24-25 epoxy-cucurbitadienol or cucurbitadienol) using oxidosqualene (e.g., 2,3-oxidosqualene or 2,3; 22,23-diepoxysqualene) as a substrate. In some embodiments, a protein can be characterized, at least in part, as a CDS enzyme based on the presence of a leucine residue at a position corresponding to position 123 of SEQ ID NO: 256.

[0146] In some embodiments, a host cell that comprises a heterologous polynucleotide encoding a CDS enzyme produces at least 10%, 20%, 30%, 40%, 50%, 60%, 70%, 80%, 90%, or 100% more cucurbitadienol compound compared to the same host cell that does not express the heterologous gene.

[0147] In other embodiments, a protein can be characterized as a CDS enzyme based on the percent identity between the protein and a known CDS enzyme. For example, the protein may be at least 10%, 15%, 20%, 25%, 30%, 35%, 40%, 45%, 50%, 55%, 60%, 65%, 70%, 75%, 80%, 85%, 90%, 91%, 92%, 93%, 94%, 95%, 96%, 97%, 98%, 99%, or 100% identical, including all values in between, to any of the CDS sequences described in this application or the sequence of any other CDS enzyme. In other embodiments, a protein can be characterized as a CDS enzyme based on the presence of one or more domains in the protein that are associated with CDS enzymes. For example, in certain embodiments, a protein is characterized as a CDS enzyme based on the presence of a substrate channel and/or an active-site cavity characteristic of CDS enzymes known in the art. In some embodiments, the active site cavity comprises a residue that acts a gate to this channel, helping to exclude water from the cavity. In some embodiments, the active-site comprises a residue that acts a proton donor to open the epoxide of the substrate and catalyze the cyclization process.

[0148] In other embodiments, a protein can be characterized as a CDS enzyme based on a comparison of the three-dimensional structure of the protein compared to the three-dimensional structure of a known CDS enzyme. It should be appreciated that a CDS enzyme can be a synthetic protein.

### C11 Hydroxylase Enzymes

[0149] Aspects of the present disclosure provide C11 hydroxylase enzymes, which may be useful, for example, in the production of mogrol.

[0150] A C11 hydroxylase of the present disclosure may comprise a sequence that is at least 5%, at least 10%, at least 15%, at least 20%, at least 25%, at least 30%, at least 35%, at least 40%, at least 45%, at least 50%, at least 55%, at least 60%, at least 65%, at least 70%, at least 71%, at least 72%, at least 73%, at least 74%, at least 75%, at least 76%, at least 77%, at least 78%, at least 79%, at least 80%, at least 81%, at least 82%, at least 83%, at least 84%, at least 85%, at least 86%, at least 87%, at least 88%, at least 89%, at least 90%, at least 91%, at least 92%, at least 93%, at least 94%, at least 95%, at least 96%, at least 97%, at least 98%, at least 99%, or at least 100% identical, including all values in between, with a C11 hydroxylase sequence (e.g., nucleic acid or amino acid sequence) in Tables 13 and 14, with a sequence set forth as SEQ ID NO: 264-265, 280-281, 296, 305, or 314-315 or to any C11 hydroxylase sequence disclosed in this application or known in the art.

[0151] In some embodiments, a C11 hydroxylase of the present disclosure is capable of oxidizing mogrol precursors (e.g., cucurbitadienol, 11-hydroxycucurbitadienol, 24,25-dihydroxy-cucurbitadienol, and/or 24,25-epoxy-cucurbitadienol). In some embodiments, a C11 hydroxylase of the present disclosure catalyzes the formation of mogrol.

[0152] It should be appreciated that activity, such as specific activity, of a C11 hydroxylase can be determined by any means known to one of ordinary skill in the art. In some embodiments, activity (e.g., specific activity) of a C11 hydroxylase may be measured as the concentration of a mogrol precursor produced or mogrol produced per unit of enzyme per unit time. In some embodiments, a C11 hydroxylase of the present disclosure has an activity (e.g., specific activity) of at least 0.0001-0.001 μmol/min/mg, at least 0.001-0.01 μmol/min/mg, at least 0.01-0.1 μmol/min/mg, or at least 0.1-1 μmol/min/mg, including all values in between.

[0153] In some embodiments, the activity, such as specific activity, of a C11 hydroxylase is at least 1.1 fold (e.g., at least 1.3 fold, at least 1.5 fold, at least 1.7 fold, at least 1.9 fold, at least 2 fold, at least 2.5 fold, at least 3 fold, at least 4 fold, at least 5 fold, at least 10 fold, at least 20 fold, at least 30 fold, at least 40 fold, at least 50 fold, at least 100 fold, at least 1000 fold or at least 10000 fold, including all values in between) greater than that of a control C11 hydroxylase.

### Cytochrome P450 Reductase Enzymes

[0154] Aspects of the present disclosure provide cytochrome P450 reductase enzymes, which may be useful, for example, in the production of mogrol. Cytochrome P450 reductase is also referred to as NADPH: ferrihemoprotein oxidoreductase, NADPH:hemoprotein oxidoreductase, NADPH:P450 oxidoreductase, P450 reductase, POR, CPR, and CYPOR. These reductases can promote C11 hydroxylase activity by catalyzing electron transfer from NADPH to a C11 hydroxylase.

[0155] Cytochrome P450 reductases of the present disclosure may comprise a sequence that is at least 5%, at least 10%, at least 15%, at least 20%, at least 25%, at least 30%, at least 35%, at least 40%, at least 45%, at least 50%, at least 55%, at least 60%, at least 65%, at least 70%, at least 71%, at least 72%, at least 73%, at least 74%, at least 75%, at least 76%, at least 77%, at least 78%, at least 79%, at least 80%, at least 81%, at least 82%, at least 83%, at least 84%, at least 85%, at least 86%, at least 87%, at least 88%, at least 89%, at least 90%, at least 91%, at least 92%, at least 93%, at least 94%, at least 95%, at least 96%, at least 97%, at least 98%, at least 99%, or at least 100% identical, including all values in between, with a cytochrome P450 reductase sequence (e.g., nucleic acid or amino acid sequence) in Tables 13 and 14, with a sequence set forth as SEQ ID NO: 266-267, 282-283, 297-298, or 306-307, or to any cytochrome p450 reductase disclosed in this application or known in the art.

[0156] In some embodiments, a cytochrome P450 reductase of the present disclosure is capable of promoting oxidation of a mogrol precursor (e.g., cucurbitadienol, 11-hydroxycucurbitadienol, 24,25-dihydroxy-cucurbitadienol, and/or 24,25-epoxy-cucurbitadienol). In some embodiments, a P450 reductase of the present disclosure catalyzes the formation of a mogrol precursor or mogrol.

[0157] It should be appreciated that activity (e.g., specific activity) of a cytochrome P450 reductase can be measured by any means known to one of ordinary skill in the art. In some embodiments, activity (e.g., specific activity) of a recombinant cytochrome P450 reductase may be measured as the concentration of a mogrol precursor produced or mogrol produced per unit enzyme per unit time in the presence of a C11 hydroxylase. In some embodiments, a cytochrome P450 reductase of the present disclosure has a activity (e.g., specific activity) of at least 0.0001-0.001 μmol/min/mg, at least 0.001-0.01 μmol/min/mg, at least 0.01-0.1 μmol/min/mg, or at least 0.1-1 μmol/min/mg, including all values in between.

[0158] In some embodiments, the activity (e.g., specific activity) of a cytochrome P450 reductase is at least 1.1 fold (e.g., at least 1.3 fold, at least 1.5 fold, at least 1.7 fold, at least 1.9 fold, at least 2 fold, at least 2.5 fold, at least 3 fold, at least 4 fold, at least 5 fold, at least 10 fold, at least 20 fold, at least 30 fold, at least 40 fold, at least 50 fold, at least 100 fold, at least 1000 fold or at least 10000 fold, including all values in between) greater than that of a control cytochrome P450 reductase.

[0159] In some embodiments, wherein 11-oxo mogrol is not a desired product, the level, expression and/or activity of a cytochrome P450 reductase, which is involved in synthesis of 11-oxo mogrol, is decreased in the host cell relative to a control host cell. In some embodiments, relative to a control host cell, the activity of a cytochrome P450 reductase is reduced in a host cell that comprises a heterologous polynucleotide that encodes a cytochrome P450 with reduced activity as compared to a control cytochrome P450 or in a host cell that comprises a heterologous polynucleotide that reduces cytochrome P450 activity. In some embodiments, the control host cell does not comprise a heterologous polynucleotide that encodes a cytochrome P450 with reduced activity as compared to a control cytochrome P450 or is a host cell that does not comprise a heterologous polynucleotide that reduces cytochrome P450 activity.

[0160] In some embodiments, the activity (e.g., specific activity) of a cytochrome P450 reductase is reduced at least 1.1 fold (e.g., at least 1.3 fold, at least 1.5 fold, at least 1.7 fold, at least 1.9 fold, at least 2 fold, at least 2.5 fold, at least 3 fold, at least 4 fold, at least 5 fold, at least 10 fold, at least 20 fold, at least 30 fold, at least 40 fold, at least 50 fold, at least 100 fold, at least 1000 fold or at least 10000 fold, including all values in between) in a host cell as compared to a control. In some embodiments, the control is a host cell that does not comprise a heterologous polynucleotide that encodes a cytochrome P450 with reduced activity as compared to a control cytochrome P450 or a host cell that does not comprise a heterologous polynucleotide that reduces cytochrome P450 activity.

### Epoxide Hydrolase Enzymes (EPHs)

[0161] Aspects of the present disclosure provide epoxide hydrolase enzymes (EPHs), which may be useful, for example, in the conversion of 24-25 epoxy-cucurbitadienol to 24-25 dihydroxy-cucurbitadienol or in the conversion of 11-hydroxy-24,25-epoxycucurbitadienol to mogrol. EPHs are capable of converting an epoxide into two hydroxyls.

[0162] EPHs of the present disclosure may comprise a sequence that is at least 5%, at least 10%, at least 15%, at least 20%, at least 25%, at least 30%, at least 35%, at least 40%, at least 45%, at least 50%, at least 55%, at least 60%, at least 65%, at least 70%, at least 71%, at least 72%, at least 73%, at least 74%, at least 75%, at least 76%, at least 77%, at least 78%, at least 79%, at least 80%, at least 81%, at least 82%, at least 83%, at least 84%, at least 85%, at least 86%, at least 87%, at least 88%, at least 89%, at least 90%, at least 91%, at least 92%, at least 93%, at least 94%, at least 95%, at least 96%, at least 97%, at least 98%, at least 99%, or at least 100% identical, including all values in between, with a EPH sequence (e.g., nucleic acid or amino acid sequence) in Tables 13 and 14, with a sequence set forth as SEQ ID NO: 268-276, 284-292, 300-301 or 309-310, or to any EPH sequence disclosed in this application or known in the art.

[0163] In some embodiments, a recombinant EPH of the present disclosure is capable of promoting hydrolysis of an epoxide in a cucurbitadienol compound (e.g., hydrolysis of the epoxide in 24-25 epoxy-cucurbitadienol). In some embodiments, an EPH of the present disclosure catalyzes the formation of a mogrol precursor (e.g., 24-25 dihydroxy-cucurbitadienol).

[0164] It should be appreciated that activity (e.g., specific activity) of an EPH can be measured by any means known to one of ordinary skill in the art. In some embodiments, activity (e.g., specific activity) of an EPH may be measured as the concentration of a mogrol precursor (e.g., 24-25 dihydroxy-cucurbitadienol) or mogrol produced. In some embodiments, a recombinant EPH of the present disclosure will allow production of at least 1-100 μg/L, at least 100-1000 μg/L, at least 1-100 mg/L, at least 100-1000 mg/L, at least 1-10 g/L or at least 10-100 g/L, including all values in between.

[0165] In some embodiments, the activity (e.g., specific activity) of an EPH is at least 1.1 fold (e.g., at least 1.3 fold, at least 1.5 fold, at least 1.7 fold, at least 1.9 fold, at least 2 fold, at least 2.5 fold, at least 3 fold, at least 4 fold, at least 5 fold, at least 10 fold, at least 20 fold, at least 30 fold, at least 40 fold, at least 50 fold, or at least 100 fold, including all values in between) greater than that of a control EPH.

### Squalene Epoxidases Enzymes (SQEs)

[0166] Aspects of the present disclosure provide squalene epoxidases (SQEs), which are capable of oxidizing a squalene (e.g., squalene or 2-3-oxidosqualene) to produce a squalene epoxide (e.g., 2-3-oxidosqualene or 2-3, 22-23-diepoxysqualene). SQEs may also be referred to as squalene monooxygenases.

[0167] SQEs of the present disclosure may comprise a sequence that is at least 5%, at least 10%, at least 15%, at least 20%, at least 25%, at least 30%, at least 35%, at least 40%, at least 45%, at least 50%, at least 55%, at least 60%, at least 65%, at least 70%, at least 71%, at least 72%, at least 73%, at least 74%, at least 75%, at least 76%, at least 77%, at least 78%, at least 79%, at least 80%, at least 81%, at least 82%, at least 83%, at least 84%, at least 85%, at least 86%, at least 87%, at least 88%, at least 89%, at least 90%, at least 91%, at least 92%, at least 93%, at least 94%, at least 95%, at least 96%, at least 97%, at least 98%, at least 99%, or at least 100% identical, including all values in between, with a SQE sequence (e.g., nucleic acid or amino acid sequence) in Tables 13 and 14, with a sequence set forth as SEQ ID NO: 277-279, 293-295, 303 or 312, or to any SQE sequence disclosed in this application or known in the art.

[0168] In some embodiments, an SQE of the present disclosure is capable of promoting formation of an epoxide in a squalene compound (e.g., epoxidation of squalene or 2,3-oxidosqualene). In some embodiments, an SQE of the present disclosure catalyzes the formation of a mogrol precursor (e.g., 2-3-oxidosqualene or 2-3, 22-23-diepoxysqualene).

[0169] Activity, such as specific activity, of a recombinant SQE may be measured as the concentration of a mogrol precursor (e.g., 2-3-oxidosqualene or 2-3, 22-23-diepoxysqualene) produced per unit of enzyme per unit of time. In some embodiments, an SQE of the present disclosure has an activity, such as specific activity, of at least 0.0000001 μmol/min/mg (e.g., at least 0.000001 μmol/min/mg, at least 0.00001 μmol/min/mg, at least 0.0001 μmol/min/mg, at least 0.001 μmol/min/mg, at least 0.01 μmol/min/mg, at least 0.1 μmol/min/mg, at least 1 μmol/min/mg, at least 10 μmol/min/mg, or at least 100 μmol/min/mg, including all values in between).

[0170] In some embodiments, the activity, such as specific activity, of a SQE is at least 1.1 fold (e.g., at least 1.3 fold, at least 1.5 fold, at least 1.7 fold, at least 1.9 fold, at least 2 fold, at least 2.5 fold, at least 3 fold, at least 4 fold, at least 5 fold, at least 10 fold, at least 20 fold, at least 30 fold, at least 40 fold, at least 50 fold, or at least 100 fold, including all values in between) greater than that of a control SQE.

### Variants

[0171] Aspects of the disclosure relate to polynucleotides encoding any of the recombinant polypeptides described, such as lanosterol synthase, acetoacetyl COA synthase, CB5, CDS, UGT, C11 hydroxylase, cytochrome P450 reductase, and EPH, SQE enzymes and any proteins associated with the disclosure. Variants of polynucleotide or amino acid sequences described in this application are also encompassed by the present disclosure. A variant may share at least 5%, at least 10%, at least 15%, at least 20%, at least 25%, at least 30%, at least 35%, at least 40%, at least 45%, at least 50%, at least 55%, at least 60%, at least 65%, at least 70%, at least 71%, at least 72%, at least 73%, at least 74%, at least 75%, at least 76%, at least 77%, at least 78%, at least 79%, at least 80%, at least 81%, at least 82%, at least 83%, at least 84%, at least 85%, at least 86%, at least 87%, at least 88%, at least 89%, at least 90%, at least 91%, at least 92%, at least 93%, at least 94%, at least 95%, at least 96%, at least 97%, at least 98%, at least 99%, or 100% sequence identity with a reference sequence, including all values in between.

[0172] Unless otherwise noted, the term “sequence identity,” as known in the art, refers to a relationship between the sequences of two polypeptides or polynucleotides, as determined by sequence comparison (alignment). In some embodiments, sequence identity is determined across the entire length of a sequence, while in other embodiments, sequence identity is determined over a region of a sequence.

[0173] Identity can also refer to the degree of sequence relatedness between two sequences as determined by the number of matches between strings of two or more residues (e.g., nucleic acid or amino acid residues). Identity measures the percent of identical matches between the smaller of two or more sequences with gap alignments (if any) addressed by a particular mathematical model, algorithms, or computer program.

[0174] Identity of related polypeptides or nucleic acid sequences can be readily calculated by any of the methods known to one of ordinary skill in the art. The “percent identity” of two sequences (e.g., nucleic acid or amino acid sequences) may, for example, be determined using the algorithm of Karlin and Altschul Proc. Natl. Acad. Sci. USA 87:2264-68, 1990, modified as in Karlin and Altschul Proc. Natl. Acad. Sci. USA 90:5873-77, 1993. Such an algorithm is incorporated into the NBLAST® and XBLAST® programs (version 2.0) of Altschul et al., J. Mol. Biol. 215:403-10, 1990. BLAST® protein searches can be performed, for example, with the XBLAST program, score=50, wordlength=3 to obtain amino acid sequences homologous to the protein molecules of the invention. Where gaps exist between two sequences, Gapped BLAST® can be utilized, for example, as described in Altschul et al., Nucleic Acids Res. 25(17):3389-3402, 1997. When utilizing BLAST® and Gapped BLAST® programs, the default parameters of the respective programs (e.g., XBLAST® and NBLAST®) can be used, or the parameters can be adjusted appropriately as would be understood by one of ordinary skill in the art.

[0175] Another local alignment technique which may be used, for example, is based on the Smith-Waterman algorithm (Smith, T. F. & Waterman, M. S. (1981) “Identification of common molecular subsequences.” J. Mol. Biol. 147:195-197). A general global alignment technique which may be used, for example, is the Needleman-Wunsch algorithm (Needleman, S. B. & Wunsch, C. D. (1970) “A general method applicable to the search for similarities in the amino acid sequences of two proteins.” J. Mol. Biol. 48:443-453), which is based on dynamic programming.

[0176] More recently, a Fast Optimal Global Sequence Alignment Algorithm (FOGSAA) was developed that purportedly produces global alignment of nucleic acid and amino acid sequences faster than other optimal global alignment methods, including the Needleman-Wunsch algorithm. In some embodiments, the identity of two polypeptides is determined by aligning the two amino acid sequences, calculating the number of identical amino acids, and dividing by the length of one of the amino acid sequences. In some embodiments, the identity of two nucleic acids is determined by aligning the two nucleotide sequences and calculating the number of identical nucleotide and dividing by the length of one of the nucleic acids.

[0177] For multiple sequence alignments, computer programs including Clustal Omega (Sievers et al., Mol Syst Biol. 2011 Oct. 11; 7:539) may be used.

[0178] In preferred embodiments, a sequence, including a nucleic acid or amino acid sequence, is found to have a specified percent identity to a reference sequence, such as a sequence disclosed in this application and/or recited in the claims when sequence identity is determined using the algorithm of Karlin and Altschul Proc. Natl. Acad. Sci. USA 87:2264-68, 1990, modified as in Karlin and Altschul Proc. Natl. Acad. Sci. USA 90:5873-77, 1993 (e.g., BLAST®, NBLAST®, XBLAST® or Gapped BLAST® programs, using default parameters of the respective programs).

[0179] In some embodiments, a sequence, including a nucleic acid or amino acid sequence, is found to have a specified percent identity to a reference sequence, such as a sequence disclosed in this application and/or recited in the claims when sequence identity is determined using the Smith-Waterman algorithm (Smith, T. F. & Waterman, M. S. (1981) “Identification of common molecular subsequences.” J. Mol. Biol. 147: 195-197) or the Needleman-Wunsch algorithm (Needleman, S. B. & Wunsch, C. D. (1970) “A general method applicable to the search for similarities in the amino acid sequences of two proteins.” J. Mol. Biol. 48:443-453).

[0180] In some embodiments, a sequence, including a nucleic acid or amino acid sequence, is found to have a specified percent identity to a reference sequence, such as a sequence disclosed in this application and/or recited in the claims when sequence identity is determined using a Fast Optimal Global Sequence Alignment Algorithm (FOGSAA).

[0181] In some embodiments, a sequence, including a nucleic acid or amino acid sequence, is found to have a specified percent identity to a reference sequence, such as a sequence disclosed in this application and/or recited in the claims when sequence identity is determined using Clustal Omega (Sievers et al., Mol Syst Biol. 2011 Oct. 11; 7:539).

[0182] As used in this application, a residue (such as a nucleic acid residue or an amino acid residue) in sequence “X” is referred to as corresponding to a position or residue (such as a nucleic acid residue or an amino acid residue) “Z” in a different sequence “Y” when the residue in sequence “X” is at the counterpart position of “Z” in sequence “Y” when sequences X and Y are aligned using amino acid sequence alignment tools known in the art.

[0183] Variant sequences may be homologous sequences. As used in this application, homologous sequences are sequences (e.g., nucleic acid or amino acid sequences) that share a certain percent identity (e.g., at least 5%, at least 10%, at least 15%, at least 20%, at least 25%, at least 30%, at least 35%, at least 40%, at least 45%, at least 50%, at least 55%, at least 60%, at least 65%, at least 70%, at least 71%, at least 72%, at least 73%, at least 74%, at least 75%, at least 76%, at least 77%, at least 78%, at least 79%, at least 80%, at least 81%, at least 82%, at least 83%, at least 84%, at least 85%, at least 86%, at least 87%, at least 88%, at least 89%, at least 90%, at least 91%, at least 92%, at least 93%, at least 94%, at least 95%, at least 96%, at least 97%, at least 98%, at least 99%, or 100% percent identity, including all values in between) and include but are not limited to paralogous sequences, orthologous sequences, or sequences arising from convergent evolution. Paralogous sequences arise from duplication of a gene within a genome of a species, while orthologous sequences diverge after a speciation event. Two different species may have evolved independently but may each comprise a sequence that shares a certain percent identity with a sequence from the other species as a result of convergent evolution.

[0184] In some embodiments, a polypeptide variant (e.g., lanosterol synthase, acetoacetyl CoA synthase, CB5, CDS, UGT, C11 hydroxylase, cytochrome P450 reductase, EPH, or SQE variant or variant of any protein associated with the disclosure) comprises a domain that shares a secondary structure (e.g., alpha helix, beta sheet) with a reference polypeptide (e.g., a reference lanosterol synthase, acetoacetyl CoA synthase, CB5, CDS, UGT, C11 hydroxylase, cytochrome P450 reductase, EPH, SQE, or any protein associated with the disclosure). In some embodiments, a polypeptide variant (e.g., lanosterol synthase, acetoacetyl CoA synthase, CB5, CDS, UGT, C11 hydroxylase, cytochrome P450 reductase, EPH, or SQE variant or variant of any protein associated with the disclosure) shares a tertiary structure with a reference polypeptide (e.g., a reference lanosterol synthase, acetoacetyl COA synthase, CB5, CDS, UGT, C11 hydroxylase, cytochrome P450 reductase, EPH, SQE, or any protein associated with the disclosure). As a non-limiting example, a variant polypeptide may have low primary sequence identity (e.g., less than 80%, less than 75%, less than 70%, less than 65%, less than 60%, less than 55%, less than 50%, less than 45%, less than 40%, less than 35%, less than 30%, less than 25%, less than 20%, less than 15%, less than 10%, or less than 5% sequence identity) compared to a reference polypeptide, but share one or more secondary structures (e.g., including but not limited to loops, alpha helices, or beta sheets, or have the same tertiary structure as a reference polypeptide. For example, a loop may be located between a beta sheet and an alpha helix, between two alpha helices, or between two beta sheets. Homology modeling may be used to compare two or more tertiary structures.

[0185] Mutations can be made in a nucleotide sequence by a variety of methods known to one of ordinary skill in the art. For example, mutations can be made by PCR-directed mutation, site-directed mutagenesis according to the method of Kunkel (Kunkel, Proc. Nat. Acad. Sci. U.S.A. 82: 488-492, 1985), by chemical synthesis of a gene encoding a polypeptide, by gene editing tools, or by insertions, such as insertion of a tag (e.g., a HIS tag or a GFP tag). Mutations can include, for example, substitutions, deletions, and translocations, generated by any method known in the art. Methods for producing mutations may be found in in references such as Molecular Cloning: A Laboratory Manual, J. Sambrook, et al., eds., Fourth Edition, Cold Spring Harbor Laboratory Press, Cold Spring Harbor, New York, 2012, or Current Protocols in Molecular Biology, F. M. Ausubel, et al., eds., John Wiley & Sons, Inc., New York, 2010.

[0186] In some embodiments, methods for producing variants include circular permutation (Yu and Lutz, Trends Biotechnol. 2011 January; 29(1):18-25). In circular permutation, the linear primary sequence of a polypeptide can be circularized (e.g., by joining the N-terminal and C-terminal ends of the sequence) and the polypeptide can be severed (“broken”) at a different location. Thus, the linear primary sequence of the new polypeptide may have low sequence identity (e.g., less than 80%, less than 75%, less than 70%, less than 65%, less than 60%, less than 55%, less than 50%, less than 45%, less than 40%, less than 35%, less than 30%, less than 25%, less than 20%, less than 15%, less than 10%, less or less than 5%, including all values in between) as determined by linear sequence alignment methods (e.g., Clustal Omega or BLAST). Topological analysis of the two proteins, however, may reveal that the tertiary structure of the two polypeptides is similar or dissimilar. Without being bound by a particular theory, a variant polypeptide created through circular permutation of a reference polypeptide and with a similar tertiary structure as the reference polypeptide can share similar functional characteristics (e.g., enzymatic activity, enzyme kinetics, substrate specificity or product specificity). In some instances, circular permutation may alter the secondary structure, tertiary structure or quaternary structure and produce a protein with different functional characteristics (e.g., increased or decreased enzymatic activity, different substrate specificity, or different product specificity). Sec, e.g., Yu and Lutz, Trends Biotechnol. 2011 January; 29(1):18-25.

[0187] It should be appreciated that in a protein that has undergone circular permutation, the linear amino acid sequence of the protein would differ from a reference protein that has not undergone circular permutation. However, one of ordinary skill in the art would be able to determine which residues in the protein that has undergone circular permutation correspond to residues in the reference protein that has not undergone circular permutation by, for example, aligning the sequences and detecting conserved motifs, and/or by comparing the structures or predicted structures of the proteins, e.g., by homology modeling.

[0188] In some embodiments, an algorithm that determines the percent identity between a sequence of interest and a reference sequence described in this application accounts for the presence of circular permutation between the sequences. The presence of circular permutation may be detected using any method known in the art, including, for example, RASPODOM (Weiner et al., Bioinformatics. 2005 Apr. 1; 21(7):932-7). In some embodiments, the presence of circulation permutation is corrected for (e.g., the domains in at least one sequence are rearranged) prior to calculation of the percent identity between a sequence of interest and a sequence described in this application. The claims of this application should be understood to encompass sequences for which percent identity to a reference sequence is calculated after taking into account potential circular permutation of the sequence.

[0189] Functional variants of the recombinant lanosterol synthases, acetoacetyl CoA synthases, CB5, CDSs, UGTs, C11 hydroxylases, cytochrome P450 reductases, EPHs, squalene epoxidases, and any other proteins disclosed in this application are also encompassed by the present disclosure. For example, functional variants may bind one or more of the same substrates (e.g., mogrol, mogroside, or precursors thereof) or produce one or more of the same products (e.g., mogrol, mogroside, or precursors thereof). Functional variants may be identified using any method known in the art. For example, the algorithm of Karlin and Altschul Proc. Natl. Acad. Sci. USA 87:2264-68, 1990 described above may be used to identify homologous proteins with known functions.

[0190] Putative functional variants may also be identified by searching for polypeptides with functionally annotated domains. Databases including Pfam (Sonnhammer et al., Proteins. 1997 July; 28(3):405-20) may be used to identify polypeptides with a particular domain. For example, among oxidosqualene cyclases, additional CDS enzymes may be identified in some instances by searching for polypeptides with a leucine residue corresponding to position 123 of SEQ ID NO: 256. This leucine residue has been implicated in determining the product specificity of the CDS enzyme; mutation of this residue can, for instance, result in cycloartenol or parkeol as a product (Takase et al., Org Biomol Chem. 2015 Jul. 13(26):7331-6).

[0191] Additional UGT enzymes may be identified, for example, by searching for polypeptides with a UDPGT domain (PROSITE accession number PS00375).

[0192] Homology modeling may also be used to identify amino acid residues that are amenable to mutation without affecting function. A non-limiting example of such a method may include use of position-specific scoring matrix (PSSM) and an energy minimization protocol. Sec, e.g., Stormo et al., Nucleic Acids Res. 1982 May 11; 10(9):2997-3011.

[0193] PSSM may be paired with calculation of a Rosetta energy function, which determines the difference between the wild-type and the single-point mutant. Without being bound by a particular theory, potentially stabilizing mutations are desirable for protein engineering (e.g., production of functional homologs). In some embodiments, a potentially stabilizing mutation has a ΔΔG_{calc} value of less than −0.1 (e.g., less than −0.2, less than −0.3, less than −0.35, less than −0.4, less than −0.45, less than −0.5, less than −0.55, less than −0.6, less than −0.65, less than −0.7, less than −0.75, less than −0.8, less than −0.85, less than −0.9, less than −0.95, or less than −1.0) Rosetta energy units (R.e.u.). See, e.g., Goldenzweig et al., Mol Cell. 2016 Jul. 21; 63(2):337-346. doi: 10.1016/j.molcel.2016.06.012.

[0194] In some embodiments, a lanosterol synthase, acetoacetyl CoA synthase, CB5, CDS, UGT, C11 hydroxylase, cytochrome P450 reductase, EPH, or SQE coding sequence or coding sequence of any protein associated with the disclosure comprises a mutation at 1, 2, 3, 4, 5, 6, 7, 8, 9, 10, 11, 12, 13, 14, 15, 16, 17, 18, 19, 20, 21, 22, 23, 24, 25, 26, 27, 28, 29, 30, 31, 32, 33, 34, 35, 36, 37, 38, 39, 40, 41, 42, 43, 44, 45, 46, 47, 48, 49, 50, 51, 52, 53, 54, 55, 56, 57, 58, 59, 60, 61, 62, 63, 64, 65, 66, 67, 68, 69, 70, 71, 72, 73, 74, 75, 76, 77, 78, 79, 80, 81, 82, 83, 84, 85, 86, 87, 88, 89, 90, 91, 92, 93, 94, 95, 96, 97, 98, 99, 100 or more than 100 positions corresponding to a reference coding sequence. In some embodiments, the lanosterol synthase, acetoacetyl CoA synthase, CB5, CDS, UGT, C11 hydroxylase, cytochrome P450 reductase, EPH, or SQE coding sequence or coding sequence of any protein associated with the disclosure comprises a mutation in 1, 2, 3, 4, 5, 6, 7, 8, 9, 10, 11, 12, 13, 14, 15, 16, 17, 18, 19, 20, 21, 22, 23, 24, 25, 26, 27, 28, 29, 30, 31, 32, 33, 34, 35, 36, 37, 38, 39, 40, 41, 42, 43, 44, 45, 46, 47, 48, 49, 50, 51, 52, 53, 54, 55, 56, 57, 58, 59, 60, 61, 62, 63, 64, 65, 66, 67, 68, 69, 70, 71, 72, 73, 74, 75, 76, 77, 78, 79, 80, 81, 82, 83, 84, 85, 86, 87, 88, 89, 90, 91, 92, 93, 94, 95, 96, 97, 98, 99, 100 or more codons of the coding sequence relative to a reference coding sequence. As will be understood by one of ordinary skill in the art, a mutation within a codon may or may not change the amino acid that is encoded by the codon due to degeneracy of the genetic code. In some embodiments, the one or more mutations in the coding sequence do not alter the amino acid sequence of the coding sequence relative to the amino acid sequence of a reference polypeptide.

[0195] In some embodiments, the one or more mutations in a recombinant lanosterol synthase, acetoacetyl CoA synthase, CB5, CDS, UGT, C11 hydroxylase, cytochrome P450 reductase, EPH, or SQE sequence or other recombinant protein sequence associated with the disclosure alter the amino acid sequence of the polypeptide relative to the amino acid sequence of a reference polypeptide. In some embodiments, the one or more mutations alter the amino acid sequence of the recombinant polypeptide relative to the amino acid sequence of a reference polypeptide and alter (enhance or reduce) an activity of the polypeptide relative to the reference polypeptide.

[0196] The activity, including specific activity, of any of the recombinant polypeptides described in this application may be measured using methods known in the art. As a non-limiting example, a recombinant polypeptide's activity may be determined by measuring its substrate specificity, product(s) produced, the concentration of product(s) produced, or any combination thereof. As used in this application, “specific activity” of a recombinant polypeptide refers to the amount (e.g., concentration) of a particular product produced for a given amount (e.g., concentration) of the recombinant polypeptide per unit time.

[0197] The skilled artisan will also realize that mutations in a recombinant polypeptide coding sequence may result in conservative amino acid substitutions to provide functionally equivalent variants of the foregoing polypeptides, e.g., variants that retain the activities of the polypeptides. As used in this application, a “conservative amino acid substitution” or “conservatively substituted” refers to an amino acid substitution that does not alter the relative charge or size characteristics or functional activity of the protein in which the amino acid substitution is made.

[0198] In some instances, an amino acid is characterized by its R group (see, e.g., Table 2). For example, an amino acid may comprise a nonpolar aliphatic R group, a positively charged R group, a negatively charged R group, a nonpolar aromatic R group, or a polar uncharged R group. Non-limiting examples of an amino acid comprising a nonpolar aliphatic R group include alanine, glycine, valine, leucine, methionine, and isoleucine. Non-limiting examples of an amino acid comprising a positively charged R group includes lysine, arginine, and histidine. Non-limiting examples of an amino acid comprising a negatively charged R group include aspartate and glutamate. Non-limiting examples of an amino acid comprising a nonpolar, aromatic R group include phenylalanine, tyrosine, and tryptophan. Non-limiting examples of an amino acid comprising a polar uncharged R group include serine, threonine, cysteine, proline, asparagine, and glutamine.

[0199] Non-limiting examples of functionally equivalent variants of polypeptides may include conservative amino acid substitutions in the amino acid sequences of proteins disclosed in this application. Conservative substitutions of amino acids include substitutions made amongst amino acids within the following groups: (a) M, I, L, V; (b) F, Y, W; (c) K, R, H; (d) A, G; (e) S, T; (f) Q, N; and (g) E, D. Additional non-limiting examples of conservative amino acid substitutions are provided in Table 2.

[0200] In some embodiments, 1, 2, 3, 4, 5, 6, 7, 8, 9, 10, 11, 12, 13, 14, 15, 16, 17, 18, 19, 20 or more than 20 residues can be changed when preparing variant polypeptides. In some embodiments, amino acids are replaced by conservative amino acid substitutions.

TABLE 2
Non-limiting Examples of Conservative Amino Acid Substitutions

| Original | | Conservative Amino |
|---|---|---|
| Residue | R Group Type | Acid Substitutions |
| Ala (A) | nonpolar aliphatic R group | Cys, Gly, Ser |
| Arg (R) | positively charged R group | His, Lys |
| Asn (N) | polar uncharged R group | Asp, Gln, Glu |
| Asp (D) | negatively charged R group | Asn, Gln, Glu |
| Cys (C) | polar uncharged R. group | Ala, Ser |
| Gln (Q) | polar uncharged R group | Asn, Asp, Glu |
| Glu (E) | negatively charged R group | Asp, Asp, Gln |
| Gly (G) | nonpolar aliphatic R group | Ala, Ser |
| His (H) | positively charged R. group | Arg, Tyr, Trp |
| Ile (I) | nonpolar aliphatic R group | Leu, Met, Val |
| Leu (L) | nonpolar aliphatic R group | Ile, Met, Val |
| Lys (K) | positively charged R group | Arg, His |
| Met (M) | nonpolar aliphatic R group | Ile, Leu, Phe, Val |
| Pro (P) | polar uncharged R group | |
| Phe (F) | nonpolar aromatic R group | Met, Trp, Tyr |
| Ser (S) | polar uncharged R group | Ala, Gly, Thr |
| Thr (T) | polar uncharged R group | Ala, Asn, Ser |
| Trp (W) | nonpolar aromatic R group | His, Phe, Tyr, Met |
| Tyr (Y) | nonpolar aromatic R group | His, Phe, Trp |
| Val (V) | nonpolar aliphatic R group | Ile, Leu, Met, Thr |

[0201] Amino acid substitutions in the amino acid sequence of a polypeptide to produce a recombinant polypeptide variant having a desired property and/or activity can be made by alteration of the coding sequence of the polypeptide. Similarly, conservative amino acid substitutions in the amino acid sequence of a polypeptide to produce functionally equivalent variants of the polypeptide typically are made by alteration of the coding sequence of the recombinant polypeptide (e.g., lanosterol synthase, acetoacetyl CoA synthase, CB5, UGT, CDS, P450, cytochrome P450 reductase, EPH, squalene epoxidase, or any protein associated with the disclosure).

### Expression of Nucleic Acids in Host Cells

[0202] Aspects of the present disclosure relate to the recombinant expression of genes encoding proteins, functional modifications and variants thereof, as well as uses relating thereto. For example, the methods described in this application may be used to produce mogrol precursors, mogrol, and/or mogrosides.

[0203] The term “heterologous” with respect to a polynucleotide, such as a polynucleotide comprising a gene, is used interchangeably with the term “exogenous” and the term “recombinant” and refers to: a polynucleotide that has been artificially supplied to a biological system; a polynucleotide that has been modified within a biological system; or a polynucleotide whose expression or regulation has been manipulated within a biological system. A heterologous polynucleotide that is introduced into or expressed in a host cell may be a polynucleotide that comes from a different organism or species from the host cell, or may be a synthetic polynucleotide, or may be a polynucleotide that is also endogenously expressed in the same organism or species as the host cell. For example, a polynucleotide that is endogenously expressed in a host cell may be considered heterologous when it is: situated non-naturally in the host cell; expressed recombinantly in the host cell, either stably or transiently; modified within the host cell; selectively edited within the host cell; expressed in a copy number that differs from the naturally occurring copy number within the host cell; or expressed in a non-natural way within the host cell, such as by manipulating regulatory regions that control expression of the polynucleotide. In some embodiments, a heterologous polynucleotide is a polynucleotide that is endogenously expressed in a host cell but whose expression is driven by a promoter that does not naturally regulate expression of the polynucleotide. In other embodiments, a heterologous polynucleotide is a polynucleotide that is endogenously expressed in a host cell and whose expression is driven by a promoter that does naturally regulate expression of the polynucleotide, but the promoter or another regulatory region is modified. In some embodiments, the promoter is recombinantly activated or repressed. For example, gene-editing based techniques may be used to regulate expression of a polynucleotide, including an endogenous polynucleotide, from a promoter, including an endogenous promoter. Sec, e.g., Chavez et al., Nat Methods. 2016 July; 13(7): 563-567. A heterologous polynucleotide may comprise a wild-type sequence or a mutant sequence as compared with a reference polynucleotide sequence.

[0204] A nucleic acid encoding any of the recombinant polypeptides, such as lanosterol synthases, acetoacetyl COA synthases, CB5, CDSs, UGTs, C11 hydroxylases, cytochrome P450 reductases, EPHs, SQEs, or any proteins associated with the disclosure, described in this application may be incorporated into any appropriate vector through any method known in the art. For example, the vector may be an expression vector, including but not limited to a viral vector (e.g., a lentiviral, retroviral, adenoviral, or adeno-associated viral vector), any vector suitable for transient expression, any vector suitable for constitutive expression, or any vector suitable for inducible expression (e.g., a galactose-inducible or doxycycline-inducible vector).

[0205] In some embodiments, a vector replicates autonomously in the cell. A vector can contain one or more endonuclease restriction sites that are cut by a restriction endonuclease to insert and ligate a nucleic acid containing a gene described in this application to produce a recombinant vector that is able to replicate in a cell. Vectors can be composed of DNA or RNA. Cloning vectors include, but are not limited to: plasmids, fosmids, phagemids, virus genomes and artificial chromosomes. As used in this application, the terms “expression vector” or “expression construct” refer to a nucleic acid construct, generated recombinantly or synthetically, with a series of specified nucleic acid elements that permit transcription of a particular nucleic acid in a host cell, such as a yeast cell. In some embodiments, the nucleic acid sequence of a gene described in this application is inserted into a cloning vector such that it is operably joined to regulatory sequences and, in some embodiments, expressed as an RNA transcript. In some embodiments, the vector contains one or more markers, such as a selectable marker as described in this application, to identify cells transformed or transfected with the recombinant vector. In some embodiments, the nucleic acid sequence of a gene described in this application is codon-optimized. Codon optimization may increase production of the gene product by at least 10%, at least 15%, at least 20%, at least 25%, at least 30%, at least 35%, at least 40%, at least 45%, at least 50%, at least 55%, at least 60%, at least 65%, at least 70%, at least 75%, at least 80%, at least 85%, at least 90%, at least 95%, or 100%, including all values in between) relative to a reference sequence that is not codon-optimized.

[0206] A coding sequence and a regulatory sequence are said to be “operably joined” or “operably linked” when the coding sequence and the regulatory sequence are covalently linked and the expression or transcription of the coding sequence is under the influence or control of the regulatory sequence. If the coding sequence is to be translated into a functional protein, the coding sequence and the regulatory sequence are said to be operably joined or linked if induction of a promoter in the 5′ regulatory sequence permits the coding sequence to be transcribed and if the nature of the linkage between the coding sequence and the regulatory sequence does not (1) result in the introduction of a frame-shift mutation, (2) interfere with the ability of the promoter region to direct the transcription of the coding sequence, or (3) interfere with the ability of the corresponding RNA transcript to be translated into a protein.

[0207] In some embodiments, the nucleic acid encoding any of the proteins described in this application is under the control of regulatory sequences (e.g., enhancer sequences). In some embodiments, a nucleic acid is expressed under the control of a promoter. The promoter can be a native promoter, e.g., the promoter of the gene in its endogenous context, which provides normal regulation of expression of the gene. Alternatively, a promoter can be a promoter that is different from the native promoter of the gene, e.g., the promoter is different from the promoter of the gene in its endogenous context.

[0208] In some embodiments, the promoter is a eukaryotic promoter. Non-limiting examples of eukaryotic promoters include TDH3, PGK1, PKC1, PDC1, TEF1, TEF2, RPL18B, SSA1, TDH2, PYK1, TPI1 GAL1, GAL10, GAL7, GAL3, GAL2, MET3, MET25, HXT3, HXT7, ACT1, ADH1, ADH2, CUP1-1, ENO2, and SOD1, as would be known to one of ordinary skill in the art (see, e.g., Addgene website: blog.addgene.org/plasmids-101-the-promoter-region). In some embodiments, the promoter is a prokaryotic promoter (e.g., bacteriophage or bacterial promoter). Non-limiting examples of bacteriophage promoters include Pls1con, T3, T7, SP6, and PL. Non-limiting examples of bacterial promoters include Pbad, PmgrB, Ptrc2, Plac/ara, Ptac, and Pm.

[0209] In some embodiments, the promoter is an inducible promoter. As used in this application, an “inducible promoter” is a promoter controlled by the presence or absence of a molecule. Non-limiting examples of inducible promoters include chemically-regulated promoters and physically-regulated promoters. For chemically-regulated promoters, the transcriptional activity can be regulated by one or more compounds, such as alcohol, tetracycline, galactose, a steroid, a metal, or other compounds. For physically-regulated promoters, transcriptional activity can be regulated by a phenomenon such as light or temperature. Non-limiting examples of tetracycline-regulated promoters include anhydrotetracycline (aTc)-responsive promoters and other tetracycline-responsive promoter systems (e.g., a tetracycline repressor protein (tetR), a tetracycline operator sequence (tetO) and a tetracycline transactivator fusion protein (tTA)). Non-limiting examples of steroid-regulated promoters include promoters based on the rat glucocorticoid receptor, human estrogen receptor, moth ecdysone receptors, and promoters from the steroid/retinoid/thyroid receptor superfamily. Non-limiting examples of metal-regulated promoters include promoters derived from metallothionein (proteins that bind and sequester metal ions) genes. Non-limiting examples of pathogenesis-regulated promoters include promoters induced by salicylic acid, ethylene or benzothiadiazole (BTH). Non-limiting examples of temperature/heat-inducible promoters include heat shock promoters. Non-limiting examples of light-regulated promoters include light responsive promoters from plant cells. In certain embodiments, the inducible promoter is a galactose-inducible promoter. In some embodiments, the inducible promoter is induced by one or more physiological conditions (e.g., pH, temperature, radiation, osmotic pressure, saline gradients, cell surface binding, or concentration of one or more extrinsic or intrinsic inducing agents). Non-limiting examples of an extrinsic inducer or inducing agent include amino acids and amino acid analogs, saccharides and polysaccharides, nucleic acids, protein transcriptional activators and repressors, cytokines, toxins, petroleum-based compounds, metal containing compounds, salts, ions, enzyme substrate analogs, hormones or any combination thereof.

[0210] In some embodiments, the promoter is a constitutive promoter. As used in this application, a “constitutive promoter” refers to an unregulated promoter that allows continuous transcription of a gene. Non-limiting examples of a constitutive promoter include TDH3, PGK1, PKC1, PDC1, TEF1, TEF2, RPL18B, SSA1, TDH2, PYK1, TPI1, HXT3, HXT7, ACT1, ADH1, ADH2, ENO2, and SOD1.

[0211] Other inducible promoters or constitutive promoters known to one of ordinary skill in the art are also contemplated.

[0212] Regulatory sequences needed for gene expression may vary between species or cell types, but generally include, as necessary, 5′ non-transcribed and 5′ non-translated sequences involved with the initiation of transcription and translation respectively, such as a TATA box, capping sequence, CAAT sequence, and the like. In particular, such 5′ non-transcribed regulatory sequences will include a promoter region which includes a promoter sequence for transcriptional control of the operably joined gene. Regulatory sequences may also include enhancer sequences or upstream activator sequences. Vectors may include 5′ leader or signal sequences. The regulatory sequence may also include a terminator sequence. In some embodiments, a terminator sequence marks the end of a gene in DNA during transcription. The choice and design of one or more appropriate vectors suitable for inducing expression of one or more genes described in this application in a host cell is within the ability and discretion of one of ordinary skill in the art.

[0213] Expression vectors containing the necessary elements for expression are commercially available and known to one of ordinary skill in the art (see, e.g., Sambrook et al., Molecular Cloning: A Laboratory Manual, Fourth Edition, Cold Spring Harbor Laboratory Press, 2012).

[0214] In some embodiments, introduction of a polynucleotide, such as a polynucleotide encoding a recombinant polypeptide, into a host cell results in genomic integration of the polynucleotide. In some embodiments, a host cell comprises at least 1 copy, at least 2 copies, at least 3 copies, at least 4 copies, at least 5 copies, at least 6 copies, at least 7 copies, at least 8 copies, at least 9 copies, at least 10 copies, at least 11 copies, at least 12 copies, at least 13 copies, at least 14 copies, at least 15 copies, at least 16 copies, at least 17 copies, at least 18 copies, at least 19 copies, at least 20 copies, at least 21 copies, at least 22 copies, at least 23 copies, at least 24 copies, at least 25 copies, at least 26 copies, at least 27 copies, at least 28 copies, at least 29 copies, at least 30 copies, at least 31 copies, at least 32 copies, at least 33 copies, at least 34 copies, at least 35 copies, at least 36 copies, at least 37 copies, at least 38 copies, at least 39 copies, at least 40 copies, at least 41 copies, at least 42 copies, at least 43 copies, at least 44 copies, at least 45 copies, at least 46 copies, at least 47 copies, at least 48 copies, at least 49 copies, at least 50 copies, at least 60 copies, at least 70 copies, at least 80 copies, at least 90 copies, at least 100 copies, or more, including any values in between, of a polynucleotide sequence, such as a polynucleotide sequence encoding any of the recombinant polypeptides described in this application, in its genome.

### Host Cells

[0215] Any of the proteins of the disclosure may be expressed in a host cell. As used in this application, the term “host cell” refers to a cell that can be used to express a polynucleotide, such as a polynucleotide that encodes a protein used in production of mogrol, mogrosides, and precursors thereof.

[0216] Any suitable host cell may be used to produce any of the recombinant polypeptides, including lanosterol synthases, acetoacetyl COA synthases, CB5, CDSs, UGTs, C11 hydroxylases, cytochrome P450 reductases, EPHs, SQEs, and other proteins disclosed in this application, including eukaryotic cells or prokaryotic cells. Suitable host cells include, but are not limited to, fungal cells (e.g., yeast cells), bacterial cells (e.g., E. coli cells), algal cells, plant cells, insect cells, and animal cells, including mammalian cells.

[0217] Suitable yeast host cells include, but are not limited to: Candida, Hansenula, Saccharomyces (e.g., S. cerevisiae), Schizosaccharomyces, Pichia, Kluyveromyces, and Yarrowia (e.g., Y. lipolytica). In some embodiments, the yeast cell is Hansenula polymorpha, Saccharomyces cerevisiae, Saccaromyces carlsbergensis, Saccharomyces diastaticus, Saccharomyces norbensis, Saccharomyces kluyveri, Schizosaccharomyces pombe, Pichia finlandica, Pichia trehalophila, Pichia kodamae, Pichia membranaefaciens, Pichia opuntiae, Pichia pastoris, Pichia pseudopastoris, Pichia membranifaciens, Komagataella pseudopastoris, Komagataella pastoris, Komagataella kurtzmanii, Komagataella mondaviorum, Pichia thermotolerans, Pichia salictaria, Pichia quercuum, Pichia pijperi, Pichia stipitis, Pichia methanolica, Pichia angusta, Komagataella phaffii, Komagataella pastoris, Kluyveromyces lactis, Candida albicans, Candida boidinii or Yarrowia lipolytica. In some embodiments, the yeast strain is an industrial polyploid yeast strain. Other non-limiting examples of fungal cells include cells obtained from Aspergillus spp., Penicillium spp., Fusarium spp., Rhizopus spp., Acremonium spp., Neurospora spp., Sordaria spp., Magnaporthe spp., Allomyces spp., Ustilago spp., Botrytis spp., and Trichoderma spp.

[0218] In certain embodiments, the host cell is an algal cell such as, Chlamydomonas (e.g., C. Reinhardtii) and Phormidium (P. sp. ATCC29409).

[0219] In other embodiments, the host cell is a prokaryotic cell. Suitable prokaryotic cells include gram positive, gram negative, and gram-variable bacterial cells. The host cell may be a species of, but not limited to: Agrobacterium, Alicyclobacillus, Anabaena, Anacystis, Acinetobacter, Acidothermus, Arthrobacter, Azobacter, Bacillus, Bifidobacterium, Brevibacterium, Butyrivibrio, Buchnera, Campestris, Campylobacter, Clostridium, Corynebacterium, Chromatium, Coprococcus, Escherichia, Enterococcus, Enterobacter, Erwinia, Fusobacterium, Faecalibacterium, Francisella, Flavobacterium, Geobacillus, Haemophilus, Helicobacter, Klebsiella, Lactobacillus, Lactococcus, Ilyobacter, Micrococcus, Microbacterium, Mesorhizobium, Methylobacterium, Methylobacterium, Mycobacterium, Neisseria, Pantoea, Pseudomonas, Prochlorococcus, Rhodobacter, Rhodopseudomonas, Rhodopseudomonas, Roseburia, Rhodospirillum, Rhodococcus, Scenedesmus, Streptomyces, Streptococcus, Synecoccus, Saccharomonospora, Saccharopolyspora, Staphylococcus, Serratia, Salmonella, Shigella, Thermoanaerobacterium, Tropheryma, Tularensis, Temecula, Thermosynechococcus, Thermococcus, Ureaplasma, Xanthomonas, Xylella, Yersinia, and Zymomonas.

[0220] In some embodiments, the bacterial host cell is of the Agrobacterium species (e.g., A. radiobacter, A. rhizogenes, A. rubi), the Arthrobacter species (e.g., A. aurescens, A. citreus, A. globformis, A. hydrocarboglutamicus, A. mysorens, A. nicotianae, A. paraffineus, A. protophonniae, A. roseoparaffinus, A. sulfureus, A. ureafaciens), or the Bacillus species (e.g., B. thuringiensis, B. anthracis, B. megaterium, B. subtilis, B. lentus, B. circulans, B. pumilus, B. lautus, B. coagulans, B. brevis, B. firmus, B. alkaophius, B. licheniformis, B. clausii, B. stearothermophilus, B. halodurans and B. amyloliquefaciens. In particular embodiments, the host cell is an industrial Bacillus strain including but not limited to B. subtilis, B. pumilus, B. licheniformis, B. megaterium, B. clausii, B. stearothermophilus and B. amyloliquefaciens. In some embodiments, the host cell is an industrial Clostridium species (e.g., C. acetobutylicum, C. tetani E88, C. lituseburense, C. saccharobutylicum, C. perfringens, C. beijerinckii). In some embodiments, the host cell is an industrial Corynebacterium species (e.g., C. glutamicum, C. acetoacidophilum). In some embodiments, the host cell is an industrial Escherichia species (e.g., E. coli). In some embodiments, the host cell is an industrial Erwinia species (e.g., E. uredovora, E. carotovora, E. ananas, E. herbicola, E. punctata, E. terreus). In some embodiments, the host cell is an industrial Pantoea species (e.g., P. citrea, P. agglomerans). In some embodiments, the host cell is an industrial Pseudomonas species, (e.g., P. putida, P. aeruginosa, P. mevalonii). In some embodiments, the host cell is an industrial Streptococcus species (e.g., S. equisimiles, S. pyogenes, S. uberis). In some embodiments, the host cell is an industrial Streptomyces species (e.g., S. ambofaciens, S. achromogenes, S. avermitilis, S. coelicolor, S. aureofaciens, S. aureus, S. fungicidicus, S. griseus, S. lividans). In some embodiments, the host cell is an industrial Zymomonas species (e.g., Z. mobilis, Z. lipolytica).

[0221] The present disclosure is also suitable for use with a variety of animal cell types, including mammalian cells, for example, human (including 293, HeLa, WI38, PER.C6 and Bowes melanoma cells), mouse (including 3T3, NS0, NS1, Sp2/0), hamster (CHO, BHK), monkey (COS, FRhL, Vero), and hybridoma cell lines.

[0222] The present disclosure is also suitable for use with a variety of plant cell types.

[0223] The term “cell,” as used in this application, may refer to a single cell or a population of cells, such as a population of cells belonging to the same cell line or strain. Use of the singular term “cell” should not be construed to refer explicitly to a single cell rather than a population of cells.

[0224] The host cell may comprise genetic modifications relative to a wild-type counterpart. As a non-limiting example, a host cell (e.g., S. cerevisiae or Y. lipolytica) may be modified to reduce or inactivate one or more of the following genes: hydroxymethylglutaryl-CoA (HMG-CoA) reductase (HMG1), acetyl-CoA C-acetyltransferase (acetoacetyl-CoA thiolase) (ERG10), 3-hydroxy-3-methylglutaryl-CoA (HMG-COA) synthase (ERG13), farnesyl-diphosphate farnesyl transferase (squalene synthase) (ERG9), may be modified to overexpress squalene epoxidase, or may be modified to downregulate lanosterol synthase. In some embodiments, the squalene epoxidase is encoded by an ERG1 gene. In some embodiments, the lanosterol synthase is encoded by an ERG7 gene. In some embodiments, a host cell (e.g., S. cerevisiae) may be modified to reduce or inactivate one or more of the following genes: hydroxymethylglutaryl-CoA (HMG-COA) reductase (HMG1), acetyl-CoA C-acetyltransferase (acetoacetyl-CoA thiolase), 3-hydroxy-3-methylglutaryl-CoA (HMG-CoA) synthase, farnesyl-diphosphate farnesyl transferase (squalene synthase), squalene epoxidase, or lanosterol synthase. In some embodiments, a host cell may be modified to reduce or inactivate the activity of a lanosterol synthase or squalene epoxidase. In some embodiments, a host cell is modified to reduce or eliminate expression of one or more transporter genes, such as PDR1 or PDR3, and/or the glucanase gene EXG1.

[0225] Reduced enzyme activity can mean decreased enzyme expression, decreased enzyme stability, decreased enzyme specific activity, and/or a decrease in enzyme function due to interference by another protein, a nucleic acid or a small molecule inhibitor as known in the art.

[0226] In some embodiments, a host cell is modified to reduce or inactivate at least 1, at least 2, at least 3, at least 4, at least 5, at least 6, at least 7, at least 8, at least 9, at least 10, at least 11, at least 12, at least 13, at least 14, at least 15, at least 16, at least 17, at least 18, at least 19, or at least 20 genes.

[0227] In some embodiments, a host cell is modified to reduce or inactivate 1, 2, 3, 4, 5, 6, 7, 8, 9, 10, 11, 12, 13, 14, 15, 16, 17, 18, 19, or 20 genes.

[0228] Reduction of gene expression and/or gene inactivation may be achieved through any suitable method, including but not limited to deletion of the gene, introduction of a point mutation into the gene, truncation of the gene, introduction of an insertion into the gene, introduction of a tag or fusion into the gene, or selective editing of the gene. For example, polymerase chain reaction (PCR)-based methods may be used (see, e.g., Gardner et al., Methods Mol Biol. 2014; 1205:45-78) or well-known gene-editing techniques may be used. As a non-limiting example, genes may be deleted through gene replacement (e.g., with a marker, including a selection marker). A gene may also be truncated through the use of a transposon system (see, e.g., Poussu et al., Nucleic Acids Res. 2005; 33(12): e104).

[0229] A vector encoding any of the recombinant polypeptides described in this application may be introduced into a suitable host cell using any method known in the art. Non-limiting examples of yeast transformation protocols are described in Gietz et al., Yeast transformation can be conducted by the LiAc/SS Carrier DNA/PEG method. Methods Mol Biol. 2006; 313:107-20, which is incorporated by reference in its entirety. Host cells may be cultured under any suitable conditions as would be understood by one of ordinary skill in the art. For example, any media, temperature, and incubation conditions known in the art may be used. For host cells carrying an inducible vector, cells may be cultured with an appropriate inducible agent to promote expression.

[0230] Aspects of the present disclosure provide a host cell comprising a mevalonate pathway (or a portion thereof), wherein the expression, level and/or activity of a lanosterol synthase (which converts 2-3-oxido-squalene to lanosterol) is decreased but not abolished. In some embodiments, the activity of a lanosterol synthase is decreased, but not abolished, using any mutation(s) or combination of mutations thereof described herein. In some embodiments, the decrease in lanosterol synthase expression, level, or activity decreases the amount of 2-3-oxido-squalene being converted into lanosterol, and increases the amount of 2-3-oxido-squalene available to be shunted into another pathway and being converted, via one or more enzymatic steps, into one or more compounds of interest, which are therefore produced at a higher level in the cell. In some embodiments, a compound of interest is a mogrol precursor, mogrol, and/or mogroside).

[0231] In some embodiments, the host cell further comprises a heterologous nucleic acid encoding an acetoacetyl COA synthase (e.g., an acetoacetyl COA synthase comprising the amino acid sequence provided in SEQ ID NO: 6 and/or encoded by a polynucleotide comprising the sequence provided in SEQ ID NO: 7), which increases synthesis of acetoacetyl-CoA, which is a precursor to 2-3-oxido-squalene.

[0232] In some embodiments, the expression, level and/or activity of an enzyme involved in production of the compound of interest is increased; in various embodiments, the enzyme involved in production of the compound of interest is any of: a UDP-glycosyltransferases (UGT) enzyme (e.g., a primary or secondary UGT), a cucurbitadienol synthase (CDS) enzyme, a C11 hydroxylase, an epoxide hydrolase (EPH), and squalene epoxidase (SQE).

[0233] In some embodiments, wherein 11-oxo mogrol is not a desired product, the level, expression and/or activity of a cytochrome P450 reductase, which is involved in synthesis of 11-oxo mogrol, is decreased.

[0234] In some embodiments, mogrol precursors include but are not limited to: 2,3,22,23-dioxidosqualene, cucurbitadienol, 24, 25-expoxycucurbitadienol, 11-hydroxycucurbitadienol, 11-hydroxy-24,25-epoxycucurbitadienol, 11-hydroxy-cucurbitadienol, 11-oxo-cucurbitadienol, and 24,25-dihydroxycucurbitadienol.

[0235] In some embodiments, mogrosides include, but are not limited to: mogroside I-A1 (MIA1), mogroside IE (MIE or MIE), mogroside II-A1 (MIIA1 or M2A1), mogroside II-A2 (MIIA2 or M2A2), mogroside III-A1 (MIIIA1 or M3A1), mogroside II-E (MIIE or M2E), mogroside III (MIII or M3), siamenoside I, mogroside IV (MIV or M4), mogroside IVa (MIVA or M4A), isomogroside IV, mogroside III-E (MIIIE or M3E), mogroside V (MV or M5), mogroside VIA (MVIA), mogroside VIB (MVIB), isomogroside V, mogroside VIa1 (MVIa1), and mogroside VI (MVI or M6). In some embodiments, the mogroside is siamenoside I, which may be referred to as siamenoside or Siam. In some embodiments, the mogroside is MIIIE.

[0236] Any of the cells disclosed in this application can be cultured in media of any type (rich or minimal) and any composition prior to, during, and/or after contact and/or integration of a nucleic acid. The conditions of the culture or culturing process can be optimized through routine experimentation as would be understood by one of ordinary skill in the art. In some embodiments, the selected media is supplemented with various components. In some embodiments, the concentration and amount of a supplemental component is optimized. In some embodiments, other aspects of the media and growth conditions (e.g., pH, temperature, etc.) are optimized through routine experimentation. In some embodiments, the frequency that the media is supplemented with one or more supplemental components, and the amount of time that the cell is cultured, is optimized.

[0237] Culturing of the cells described in this application can be performed in culture vessels known and used in the art. In some embodiments, an aerated reaction vessel (e.g., a stirred tank reactor) is used to culture the cells. In some embodiments, a bioreactor or fermenter is used to culture the cell. Thus, in some embodiments, the cells are used in fermentation. As used in this application, the terms “bioreactor” and “fermenter” are interchangeably used and refer to an enclosure, or partial enclosure, in which a biological, biochemical and/or chemical reaction takes place, involving a living organism, part of a living organism, or purified proteins. A “large-scale bioreactor” or “industrial-scale bioreactor” is a bioreactor that is used to generate a product on a commercial or quasi-commercial scale. Large scale bioreactors typically have volumes in the range of liters, hundreds of liters, thousands of liters, or more.

[0238] Non-limiting examples of bioreactors include: stirred tank fermenters, bioreactors agitated by rotating mixing devices, chemostats, bioreactors agitated by shaking devices, airlift fermenters, packed-bed reactors, fixed-bed reactors, fluidized bed bioreactors, bioreactors employing wave induced agitation, centrifugal bioreactors, roller bottles, and hollow fiber bioreactors, roller apparatuses (for example benchtop, cart-mounted, and/or automated varieties), vertically-stacked plates, spinner flasks, stirring or rocking flasks, shaken multi-well plates, MD bottles, T-flasks, Roux bottles, multiple-surface tissue culture propagators, modified fermenters, and coated beads (e.g., beads coated with serum proteins, nitrocellulose, or carboxymethyl cellulose to prevent cell attachment).

[0239] In some embodiments, the bioreactor includes a cell culture system where the cell (e.g., yeast cell) is in contact with moving liquids and/or gas bubbles. In some embodiments, the cell or cell culture is grown in suspension. In other embodiments, the cell or cell culture is attached to a solid phase carrier. Non-limiting examples of a carrier system includes microcarriers (e.g., polymer spheres, microbeads, and microdisks that can be porous or nonporous), cross-linked beads (e.g., dextran) charged with specific chemical groups (e.g., tertiary amine groups), 2D microcarriers including cells trapped in nonporous polymer fibers, 3D carriers (e.g., carrier fibers, hollow fibers, multicartridge reactors, and semi-permeable membranes that can comprising porous fibers), microcarriers having reduced ion exchange capacity, encapsulation cells, capillaries, and aggregates. In some embodiments, carriers are fabricated from materials such as dextran, gelatin, glass, or cellulose.

[0240] In some embodiments, industrial-scale processes are operated in continuous, semi-continuous or non-continuous modes. Non-limiting examples of operation modes are batch, fed batch, extended batch, repetitive batch, draw/fill, rotating-wall, spinning flask, and/or perfusion mode of operation. In some embodiments, a bioreactor allows continuous or semi-continuous replenishment of the substrate stock, for example a carbohydrate source and/or continuous or semi-continuous separation of the product, from the bioreactor.

[0241] In some embodiments, the bioreactor or fermenter includes a sensor and/or a control system to measure and/or adjust reaction parameters. Non-limiting examples of reaction parameters include biological parameters (e.g., growth rate, cell size, cell number, cell density, cell type, or cell state, etc.), chemical parameters (e.g., pH, redox-potential, concentration of reaction substrate and/or product, concentration of dissolved gases, such as oxygen concentration and CO₂ concentration, nutrient concentrations, metabolite concentrations, concentration of an oligopeptide, concentration of an amino acid, concentration of a vitamin, concentration of a hormone, concentration of an additive, serum concentration, ionic strength, concentration of an ion, relative humidity, molarity, osmolarity, concentration of other chemicals, for example buffering agents, adjuvants, or reaction by-products), physical/mechanical parameters (e.g., density, conductivity, degree of agitation, pressure, and flow rate, shear stress, shear rate, viscosity, color, turbidity, light absorption, mixing rate, conversion rate, as well as thermodynamic parameters, such as temperature, light intensity/quality, etc.). Sensors to measure the parameters described in this application are well known to one of ordinary skill in the relevant mechanical and electronic arts. Control systems to adjust the parameters in a bioreactor based on the inputs from a sensor described in this application are well known to one of ordinary skill in the art in bioreactor engineering.

[0242] In some embodiments, the method involves batch fermentation (e.g., shake flask fermentation). General considerations for batch fermentation (e.g., shake flask fermentation) include the level of oxygen and glucose. For example, batch fermentation (e.g., shake flask fermentation) may be oxygen and glucose limited, so in some embodiments, the capability of a strain to perform in a well-designed fed-batch fermentation is underestimated. Also, the final product (e.g., mogrol precursor, mogrol, mogroside precursor, or mogroside) may display some differences from the substrate (e.g., mogrol precursor, mogrol, mogroside precursor, or mogroside) in terms of solubility, toxicity, cellular accumulation and secretion and in some embodiments can have different fermentation kinetics.

[0243] Aspects of the present disclosure provide methods of increasing production of a compound of interest, e.g., a mogrol precursor, mogrol, and/or mogroside in a host cell by decreasing but not abolishing lanosterol synthase activity by introducing one or more mutation(s) described herein into lanosterol synthase. In some embodiments, the methods further comprise increasing the expression, level and/or activity of an enzyme involved in synthesis of the compound of interest, e.g., a UDP-glycosyltransferases (UGT) enzyme, a cucurbitadienol synthase (CDS) enzyme, a C11 hydroxylase, an epoxide hydrolase (EPH), and/or a squalene epoxidase (SQE). In some embodiments of the method, wherein 11-oxo mogrol is not a desired product, the level, expression and/or activity of a cytochrome P450 reductase is decreased. In some embodiments of the method, the host cell further comprises a heterologous polynucleotide encoding an acetoacetyl CoA synthase.

[0244] The methods described in this application encompass production of the mogrol precursors (e.g., squalene, 2,3-oxidosqualene, or 24-25 epoxy-cucurbitadienol), mogrol, or mogrosides (e.g., MIA1, MIE1, MIIA1, MIIA2, MIIIA1, MIIE, MIII, siamenoside I, mogroside IV, isomogroside IV, MIIIE, MVIA, MVIB, isomogroside V, MVIa1, and mogroside V) using a recombinant cell, cell lysate or isolated recombinant polypeptides (e.g., lanosterol synthase, acetoacetyl CoA synthase, CB5, CDS, UGT, C11 hydroxylase, cytochrome P450 reductase, EPH, squalene epoxidase, and any proteins associated with the disclosure).

[0245] Mogrol precursors (e.g., squalene, 2,3-oxidosqualene, or 24-25 epoxy-cucurbitadienol), mogrol, mogrosides (e.g., MIA1, MIE, MIIA1, MIIA2, MIIIA1, MIIE, MIII, siamenoside I, mogroside IV, isomogroside IV, MIIIE, MVIA, MVIB, isomogroside V, MVIa1, and mogroside V) produced by any of the recombinant cells disclosed in this application may be identified and extracted using any method known in the art. Mass spectrometry (e.g., LC-MS, GC-MS) is a non-limiting example of a method for identification and may be used to help extract a compound of interest.

[0246] The phraseology and terminology used in this application is for the purpose of description and should not be regarded as limiting. The use of terms such as “including,” “comprising,” “having,” “containing,” “involving,” and/or variations thereof in this application, is meant to encompass the items listed thereafter and equivalents thereof as well as additional items.

[0247] The present invention is further illustrated by the following Examples, which in no way should be construed as further limiting. The entire contents of all of the references (including literature references, issued patents, published patent applications, and co pending patent applications) cited throughout this application are hereby expressly incorporated by reference.

### EXAMPLES

### Example 1. Identification of Lanosterol Synthases with Reduced Activity

[0248] This Example describes identification of lanosterol synthases with reduced activity. Mutagenic PCR was performed on an ERG7 template, and the PCR mixture was cleaved with BsaI and ligated to pERG7.NatR cleaved with HindIII and NcoI, to create a library of mutants, ranging from low (2-4 mutations per gene), to medium (6-9 mutations per gene), to high (12-20 mutations per gene). Cleavage of these plasmids with PacI and SspI and introduction into a Yarrowia strain (genotype pTEF-HMGt erg7Δ13 [GPR1-1 ERG7 HygR]) yielded plates (grown at 22° C. or 30° C.) of nourseothricin resistant (NatR) transformants that were replica-plated to YNBAc (YNB+30 mM glacial acetic acid) at the appropriate temperature. 372 acetate resistant (AcR) clones were identified and picked to YPD medium, grown at the appropriate temperature, and subsequently inoculated to YPD4 medium, grown for three days at 30° C. and the supernatants assayed for mevalonic acid by LC-RIA. AcR cells are able to grow on media containing acetic acid. At the same time, the clones propagated originally at 22° C. were tested for temperature sensitive growth at 32° C., while those grown at 30° C. were tested for cold sensitivity at 18° C.

[0249] As shown in Table 3 and FIG. 2, nine temperature sensitive (T.s.) and three partially cold sensitive (C.s.) clones were identified that increased mevalonate titer relative to the parent. These strains were 1A3, 2F9, 2F6, 2C5, 2B3, 2A5, 2F1, 3B9, and 3D11. Of the strains tested, 2F6, which harbors the lanosterol synthase set forth in SEQ ID NO: 3, showed the highest mevalonate titer. 4A6 and 4F11 have the same mutations. The strains not labeled as T.s. or C.s. are neither temperature- nor cold-sensitive.

TABLE 3
Lanosterol Synthase Activity as Determined
by Mevalonate Titer in Yarrowia host cells*

| | | Protein | | Type |
|---|---|---|---|---|
| | Mutation(s) relative | SEQ | Mevalonate | of |
| Strain | to SEQ ID NO: 1 | ID NO: | titer (g/L) | Mutant |
| Parent | none | 1 | 0.0 ± 0.0 | |
| 1A3 | R33Q, R193C, D289G, | 331 | 1.6 | T.s. |
| | N295I, S296T, N620S, | | | |
| | and Y736F | | | |
| 1F5 | unknown | | 1.1 | |
| 1G10 | unknown | | 0.7 | |
| 2G11 | unknown | | 0.7 | |
| 2F11 | R184W, L235M, L260R, | 119 | 1 | |
| | and E710Q | | | |
| 2F9 | K47E, L92I, T360S, | 325 | 1 | T.s. |
| | S372P, T444M, and R578P | | | |
| 2D9 | unknown | | 0.9 | |
| 2F6 | D50G, K66R, N94S, G417S, | 3 | 2.7 | T.s. |
| | E617V, and F726L | | | |
| 2C5 | N14Y, N132S, Y145C, | 329 | 0.8 | T.s. |
| | R193H, I286F, L316R, | | | |
| | F432I, E442V, T444S, | | | |
| | I479S, K631R, and T655A | | | |
| 2H4 | F432S, D452G, and I536F | 85 | 1.4 | |
| 2B3 | E287G, K329N, E617V, and | 324 | 1.2 | T.s |
| | F726V | | | |
| 2A5 | E231V, A407V, Q423L, | 323 | 1 | T.s. |
| | A529T, and Y564C | | | |
| 2F1 | V248F, D371V, and G702D | 118 | 1.1 | T.s. |
| 3A5 | L197V, K282I, N314S, | 326 | 0.8 | |
| | P370L, A608T, G638D, and | | | |
| | F650L | | | |
| 3A8 | L491Q, Y586F, and R660H | 120 | 1.2 | |
| 3B9 | G122C, H249L, and K738M | 316 | 0.9 | C.s. |
| 3C9 | P227L, E474V, V559A, and | 318 | 1.3 | |
| | Y564N | | | |
| 3D11 | K85N, G158S, S515L, | 321 | 0.8 | C.s |
| | P526T, Q619L, and | | | |
| | Q742* | | | |
| 4D1 | unknown | | 0.8 | |
| 4A6 | G107D and K631E | 319 | 1.3 | |
| 4B11 | T212I, W213L, N544Y, and | 322 | 1.3 | |
| | V552E | | | |
| 4F11 | G107D and K631E | 319 | 1.3 | |
| 4B12 | I172N, C414S, L560M, and | 84 | 1.1 | |
| | G679S | | | |

*indicates a truncation

[0250] Many of the mevalonate-excreting ERG7 alleles also significantly perturbed the steady state levels of other metabolites; 2F6 in particular decreased squalene, and increased oxidosqualene, dioxidosqualene, and ergosterol.

### Example 2. Characterization of an Acetoacetyl COA Synthase that Increases Squalene Production in Yarrowia Host Cells

[0251] This Example describes characterization of the effect of an acetoacetyl COA synthase on squalene production in a host cell. An acetoacetyl COA synthase comprising SEQ ID NO: 6 and encoded by SEQ ID NO: 7 was constructed. Various constructs were constructed, each expressing the acetoacetyl COA synthase under the control of a different promoter. The constructs were then randomly inserted into a Yarrowia host cell strain that produced about 17.2 mg/L squalene. As shown in Table 4, the acetoacetyl CoA synthase (represented by SEQ ID NO: 6 and 7) increased squalene titers to about 23.8-33 mg/L.

TABLE 4
Expression of an Acetoacetyl COA Synthase (SEQ ID NO:
6) Under the Control of Various Promoters in Yarrowia

| | | Average | |
|---|---|---|---|
| | Squalene | Squalene | |
| | [mg/L] | [mg/L] | promoter expressing NphT7 |
| Control | 18.9 | 17.2 | — |
| Control | 15.1 | | |
| Control | 17.6 | | |
| NphT7-A | 32.4 | 30.1 | tef Yarrowia alimentaria |
| NphT7-A | 28.9 | | (YAALOS06) |
| NphT7-A | 29.1 | | |
| NphT7-B | 27.5 | 28.6 | act1p (YB392) |
| NphT7-B | 28.7 | | |
| NphT7-B | 29.7 | | |
| NphT7-D | 20.9 | 27.8 | pMDH1 (YB392) |
| NphT7-D | 33.5 | | |
| NphT7-D | 29.1 | | |
| NphT7-F | 31.4 | 32.7 | gapDH Y. porcina (YAPO0S01) |
| NphT7-F | 32.3 | | |
| NphT7-F | 34.3 | | |
| NphT7-G | 35.9 | 33.0 | tef Y. deformans (YADE0S01) |
| NphT7-G | 30.0 | | |
| NphT7-G | 33.1 | | |
| NphT7-H | 23.5 | 24.0 | gapDH C. osloensis (YAOS0S01) |
| NphT7-H | 23.2 | | |
| NphT7-H | 25.4 | | |
| NphT7-I | 19.8 | 23.8 | tef Y. sp. (JCM 30694) |
| NphT7-I | 25.2 | | |
| NphT7-I | 26.6 | | |

[0252] Several of the nphT7 cassettes also induced very high mevalonate secretion, up to 5 g/L. which represents a significant fraction of the theoretical yield.

### Example 3. Production of Cucurbitadienol in ERG7 Mutant Host Cells

[0253] This Example describes characterization of cucurbitadienol synthases (CDSs) in different Yarrowia host cells comprising mutants of SEQ ID NO: 1.

[0254] Acetate resistant (AcR) cells were generated as in Example 1 using pERG7-NatR plasmids that resulted in clones with high mevalonate titers. AcR cells are able to grow on media containing acetic acid. Constructs encoding a particular CDS were inserted randomly into these cells. All strains except for strains 887779 and 870688 express AquAgaCDS16 (SEQ ID NOs: 226 and 327). Strains 887779 and 870688 express SgCDS1 (SEQ ID NOS: 256 and 332). Strains 950910 and 950917 also express NphT7 (SEQ ID NO: 6). The resulting nourseothricin resistant (NatR) isolates were picked and grown in 96-deepwell plates in 0.5 mL YPD medium for two days at 30° C., subcultured into 0.5 mL YPD10 medium for 4 days at 30° C. and then the cultures were assayed for cucurbitadienol by GC-MS. Nourseothricin resistance allows for the selection of cells comprising a heterologous nucleic acid encoding a CDS. Strain 870688 comprising SEQ ID NO: 1 was used as a control.

[0255] As shown in Table 5 and FIG. 3, cucurbitadienol titers of Yarrowia strains comprising a mutant lanosterol synthase are significantly greater than the strain comprising SEQ ID NO: 1.

[0256] A selection of strains was then run in ambr 250 bioreactors, where cucurbitadienol, ergosterol and lanosterol were assayed by GC-MS and mevalonate by HPLC. Strain 887779 comprising SEQ ID NO: 1 was used as a control. As shown in FIG. 4 and Tables 6A-6B, Yarrowia strains with mutant lanosterol synthase alleles accumulate less lanosterol and more mevalonate and cucurbitadienol relative to a strain comprising the wild-type lanosterol synthase comprising SEQ ID NO: 1.

TABLE 5
Effects of Lanosterol Synthase Mutations on Cucurbitadienol Production in Yarrowia

| | | | | Average Fold |
|---|---|---|---|---|
| | | | | Cucurbitadienol |
| | | | Average | Titer Increase |
| Yarrowia | Lanosterol synthase mutations | Protein | Cucurbitadienol | Relative to |
| Strain | relative to SEQ ID NO: 1 | SEQ ID NO | Titer (mg/L) | Strain 870688 |
| 948821 | K85N and G158S | 86 | 314.7 | 35.6 |
| 950910 | I172N, C414S, L560M, and | 84 | 295.4 | 33.4 |
| | G679S | | | |
| 948823 | I172N, C414S, L560M, and | 84 | 245 | 27.7 |
| | G679S | | | |
| 907808 | R193C, D289G, N295I, | 83 | 233.7 | 26.4 |
| | S296T, N620S, and Y736F | | | |
| 950867 | D80G, P83L, T170A, T198I, | 92 | 225.4 | 25.5 |
| | and A228T | | | |
| 948825 | I172N, C414S, and L560M | 89 | 218.3 | 24.7 |
| 950866 | D371V, K498N, M610I, and | 91 | 194 | 21.9 |
| | G702D | | | |
| 950872 | T360S, S372P, T444M, and | 94 | 184.8 | 20.9 |
| | R578P | | | |
| 948806 | I172N, C414S, L560M, and | 84 | 175 | 19.8 |
| | G679S | | | |
| 950868 | D50G, K66R, N94S, G417S, | 3 | 157.8 | 17.8 |
| | E617V, and F726L | | | |
| 948810 | F432S, D452G, and I536F | 85 | 149.4 | 16.9 |
| 950865 | D371V, M610I, and G702D | 90 | 137.7 | 15.6 |
| 950917 | D50G, K66R, N94S, G417S, | 95 | 129.3 | 14.6 |
| | and E617V | | | |
| 950887 | D50G, K66R, N94S, G417S, | 95 | 128.1 | 14.5 |
| | and E617V | | | |
| 948822 | L197V, K282I, N314S, and | 87 | 127.6 | 14.4 |
| | P370L | | | |
| 950888 | D80G, P83L, T170A, T198I, | 92 | 124.7 | 14.1 |
| | and A228T | | | |
| 959829 | L309F, V344A, T398I, and | 99 | 32.1 | 3.6 |
| | K686E | | | |
| 870688 | N/A (wild-type ERG7 (WT)) | 1 | 8.9 | 1 |

TABLE 6A
Effects of Lanosterol Synthase Mutations on Cucurbitadienol Production in Yarrowia

| | | | | Average Fold |
|---|---|---|---|---|
| | | | | Cucurbitadienol |
| | | | Average | Titer Increase |
| Yarrowia | Lanosterol synthase mutations | Protein | Cucurbitadienol | Relative to |
| Strain | relative to SEQ ID NO: 1 | SEQ ID NO | Titer (mg/L) | Strain 870688 |
| 907811 | D50G, K66R, N94S, G417S, E617V, | 3 | 2522.1 | 13.3 |
| | and F726L | | | |
| 950865 | D371V, M610I, and G702D | 90 | 1327.7 | 7.0 |
| 950872 | T360S, S372P, T444M, and R578P | 94 | 1200.2 | 6.4 |
| 950866 | D371V, K498N, M610I, and G702D | 91 | 1143.8 | 6.1 |
| 948823 | I172N, C414S, L560M, and G679S | 84 | 764.5 | 4.0 |
| 948825 | I172N, C414S, and L560M | 89 | 638.5 | 3.4 |
| 950867 | D80G, P83L, T170A, T198I, and | 92 | 231.2 | 1.2 |
| | A228T | | | |
| 887779 | N/A (wild-type ERG7 (WT)) | 1 | 189.0 | 1.0 |

TABLE 6B
Effects of Lanosterol Synthase Mutations on Ergosterol,
Lanosterol, and Mevalonate Production in Yarrowia

| Yarrowia | Lanosterol synthase mutations | Protein | Ergosterol | Lanosterol | Mevalonate |
|---|---|---|---|---|---|
| Strain | relative to SEQ ID NO: 1 | SEQ ID NO | (mg/L) | (mg/L) | (g/L) |
| 907811 | D50G, K66R, N94S, G417S, E617V, | 3 | 580.6 | 137.4 | 5.57 |
| | and F726L | | | | |
| 950865 | D371V, M610I, and G702D | 90 | 452.2 | 8.2 | 5.29 |
| 950872 | T360S, S372P, T444M, and R578P | 94 | 496.5 | 8.1 | 3.08 |
| 950866 | D371V, K498N, M610I, and G702D | 91 | 455.7 | 10.8 | 4.18 |
| 948823 | I172N, C414S, L560M, and G679S | 84 | 443.5 | 11.9 | 3.6 |
| 948825 | I172N, C414S, and L560M | 89 | 436.6 | 11.1 | 3.09 |
| 950867 | D80G, P83L, T170A, T198I, and | 92 | 537.9 | 8.2 | 0.293 |
| | A228T | | | | |
| 887779 | N/A (wild-type ERG7 (WT)) | 1 | 422.0 | 207.9 | 0 |

### Example 4. Production of Oxidosqualene in Saccharomyces cerevisiae Host Cells with Mutants of SEQ ID NO: 313

[0257] This Example describes identification of lanosterol synthases with reduced activity using SEQ ID NO: 313 as a template for mutation.

[0258] Three different temperature sensitive lanosterol synthase mutants were tested and host cells comprising each of these lanosterol synthase mutants were analyzed for consumption of glucose and production of oxidosqualene, mevalonate, ergosterol, and ethanol. A parent strain with a native lanosterol synthase (SEQ ID NO: 313) was used as the negative control.

[0259] Strain 756247 expressed a lanosterol synthase comprising the protein sequence of SEQ ID NO: 100. The nucleotide sequence encoding SEQ ID NO: 100 comprises the following mutations relative to SEQ ID NO: 8 (mutations in SEQ ID NO: 100 relative to SEQ ID NO: 313 are shown in parenthesis): C361T (P121S), C407T (A136V), G474A (silent), A898G (S300G), A909G (silent), T965G (V322G), A1312G (K438E), T1506A (F502L), T1732C (silent), A1882G (K628E), and T2178G (Y726*—truncation mutation). A silent mutation results in no change in the amino acid sequence.

[0260] Strain 756248 expressed a lanosterol synthase comprising the protein sequence of SEQ ID NO: 101. The nucleotide sequence encoding SEQ ID NO: 101 comprises the following mutations relative to SEQ ID NO: 8 (mutations in SEQ ID NO: 101 relative to SEQ ID NO: 313 are shown in parenthesis): C333T (silent), A803G/A804T (K268S), A841G (T281A), T1504C (F502L), C1811A (T604N), G1966A (A656T), and A2078G (E693G).

[0261] Strain 756249 expressed a lanosterol synthase comprising the protein sequence of SEQ ID NO: 102. The nucleotide sequence encoding SEQ ID NO: 102 comprises the following mutations relative to SEQ ID NO: 8 (mutations in SEQ ID NO: 102 relative to SEQ ID NO: 313 are shown in parenthesis): A190G (R64G), A358G (I120V), G678T (M226I), T823A (F275I), A997G (T333A), and T1855A (C619S).

[0262] To measure 2-3-oxidosqualene production, strains were first grown overnight at 30° C., diluted to a starting OD of 0.2 and grown for an additional 16 h either at 30° C. or 35° C. in triplicates in 96-well deep well plates. Cell culture volumes were 500 μL and the media used in this experiment was YPD (10 g/L Yeast Extract, 20 g/L Peptone and 20 g/L Dextrose). 200 μL of the culture and 400 μL of ethyl acetate containing internal standards (100 μm tridecane and 100 mg/L pregnenolone) were transferred to a 96-well deep well plate containing 100 μL of silica/zirconia beads (0.5 mm dia., Cat.no. 11079105z Biospec) in each well. The plate containing the samples was heat sealed and agitated at 1750 rpm for 5 minutes using a Genogrinder. The plate was then centrifuged for 10 minutes at 4000 rpm at 4° C. to separate the aqueous and organic layers. The plate was then stored at −30° C. for 2 h to freeze the aqueous layer and 100 μL from the top layer was transferred to a glass vial analyzed by a GC-FID. A gas chromatograph (Thermo Scientific Trace 1310) with a TG-5MS column (15 m×0.25 mm×0.25 μm) was used at a flow rate of 1.5 mL/min. The eluents were determined by comparing peak retention times to those of known standard substances, and the amounts were quantified by comparing the peak area of the analyte to the peak area of the standard substance at known concentrations.

[0263] As shown in FIG. 6 and Table 7, at 30° C., Saccharomyces cerevisiae host cells comprising any one of SEQ ID NOs: 100-102 produced less ergosterol than the parent strain (the negative control), indicating that lanosterol synthases comprising any one of SEQ ID NOs: 100-102 were less active and had impaired lanosterol synthase activity compared to a wild-type lanosterol synthase comprising SEQ ID NO: 313 at this temperature. At 30° C., 5-10 mg/L of oxidosqualene was detected in all three lanosterol synthase mutant strains while the control strain did not produce detectable levels of oxidosqualene (FIG. 5 and Table 7). Thus, host cells with decreased lanosterol synthase activity showed increased oxidosqualene production.

[0264] At 35° C., the lanosterol synthase mutant strains were unable to grow or grew minimally compared to the control strain as shown by the residual glucose numbers (FIG. 7 and Table 8). For all strains, the starting glucose concentration was 20 g/L. Without being bound by a particular theory, it is possible that since the lanosterol synthase mutants are temperature sensitive, the cells cannot survive in the absence of a functional lanosterol synthase comprising SEQ ID NO: 313 at higher temperatures. Only strain 756249 accumulated some oxidosqualene at 35° C. The control strain with the native lanosterol synthase gene encoding SEQ ID NO: 313 was able to consume all the glucose at 30° C. and 35° C., but did not produce detectable levels of oxidosqualene. Thus, the results suggest that complete knockout of lanosterol synthase activity is detrimental to these cells.

TABLE 7
Effects of Lanosterol Synthase Mutations Relative to
SEQ ID NO: 313 on Glucose Consumption and Oxidosqualene,
Mevalonate, Ergosterol, and Ethanol Production by
Saccharomyces cerevisiae Host Cells at 30° C.

| Saccharomyces | | Oxidosqua- | Glu- | | Ergos- | Eth- |
|---|---|---|---|---|---|---|
| cerevisiae | | lene | cose | Mevalonate | terol | anol |
| Strain | | (mg/L) | [g/L] | [g/L] | [mg/L] | [g/L] |
| Negative | 1 | 0.00 | 0.04 | 0.00 | 22.29 | 8.98 |
| control | 2 | 0.00 | 0.04 | 0.00 | 26.89 | 8.36 |
| (parent | 3 | 0.00 | 0.04 | 0.00 | 24.75 | 8.42 |
| strain with | | | | | | |
| a wild-type | | | | | | |
| lanosterol | | | | | | |
| synthase) | | | | | | |
| 756247 | 1 | 6.38 | 0.04 | 0.00 | 10.49 | 9.35 |
| | 2 | 7.01 | 0.04 | 0.00 | 12.71 | 9.52 |
| | 3 | 0.00 | 0.09 | 0.00 | 12.08 | 9.44 |
| 756248 | 1 | 5.71 | 16.10 | 0.00 | 0.00 | 2.50 |
| | 2 | 0.00 | 17.00 | 0.00 | 0.00 | 2.26 |
| | 3 | 10.53 | 17.00 | 0.00 | 0.00 | 2.36 |
| 756249 | 1 | 6.05 | 0.04 | 0.00 | 9.51 | 10.90 |
| | 2 | 0.00 | 0.03 | 0.00 | 17.32 | 9.52 |
| | 3 | 0.00 | 0.03 | 0.00 | 17.66 | 9.72 |

TABLE 8
Effects of Lanosterol Synthase Mutations Relative to
SEQ ID NO: 313 on Glucose Consumption and Oxidosqualene,
Mevalonate, Ergosterol, and Ethanol Production by
Saccharomyces cerevisiae Host Cells at 35° C.

| Saccharomyces | | Oxidosqua- | Glu- | | Ergos- | Eth- |
|---|---|---|---|---|---|---|
| cerevisiae | | lene | cose | Mevalonate | terol | anol |
| Strain | | (mg/L) | [g/L] | [g/L] | [mg/L] | [g/L] |
| Negative | 1 | 0.00 | 0.04 | 0.00 | 18.78 | 6.37 |
| control | 2 | 0.00 | 0.04 | 0.00 | 19.35 | 6.54 |
| (parent | 3 | 0.00 | 0.04 | 0.00 | 19.48 | 6.63 |
| strain with | | | | | | |
| a wild-type | | | | | | |
| lanosterol | | | | | | |
| synthase) | | | | | | |
| 756247 | 1 | 0.00 | 18.00 | 0.00 | 0.00 | 1.54 |
| | 2 | 0.00 | 18.10 | 0.00 | 0.00 | 1.48 |
| | 3 | 0.00 | 18.00 | 0.00 | 0.00 | 1.37 |
| 756248 | 1 | 0.00 | 21.00 | 0.00 | 0.00 | 0.53 |
| | 2 | 0.00 | 21.00 | 0.00 | 0.00 | 0.31 |
| | 3 | 0.00 | 20.70 | 0.00 | 0.00 | 0.28 |
| 756249 | 1 | 5.24 | 17.20 | 0.00 | 0.00 | 1.98 |
| | 2 | 7.54 | 16.40 | 0.00 | 0.00 | 2.29 |
| | 3 | 0.00 | 16.40 | 0.00 | 0.00 | 2.26 |

TABLE 9
Non-limiting Examples of Amino Acid
Changes Relative to SEQ ID NO: 1*

| | |
|---|---|
| | Amino acid change |
| Position | relative to SEQ ID NO: 1 |

| | | |
|---|---|---|
| 14 | N14Y | |
| 33 | R33Q | |
| 47 | K47E | |
| 50 | D50G | |
| 66 | K66R | |
| 80 | D80G | |
| 83 | P83L | |
| 85 | K85N | |
| 92 | L92I | |
| 94 | N94S | |
| 107 | G107D | |
| 122 | G122C | |
| 132 | N132S | |
| 145 | Y145C | |
| 158 | G158S | |
| 170 | T170A | |
| 172 | I172N | |
| 184 | R184W | |
| 193 | R193C | R193H |
| 197 | L197V | |
| 198 | T198I | |
| 212 | T212I | |
| 213 | W213L | |
| 227 | P227L | |
| 228 | A228T | |
| 231 | E231V | |
| 235 | L235M | |
| 248 | V248F | |
| 249 | H249L | |
| 260 | L260R | |
| 282 | K282I | |
| 286 | I286F | |
| 287 | E287G | |
| 289 | D289G | |
| 295 | N295I | |
| 296 | S296T | |
| 309 | L309F | |
| 314 | N314S | |
| 316 | L316R | |
| 329 | K329N | |
| 344 | V344A | |
| 360 | T360S | |
| 370 | P370L | |
| 371 | D371V | |
| 372 | S372P | |
| 398 | T398I | |
| 407 | A407V | |
| 414 | C414S | |
| 417 | G417S | |
| 423 | Q423L | |
| 432 | F432I | F432S |
| 437 | R437L | |
| 442 | E442V | |
| 444 | T444M | T444S |
| 452 | D452G | |
| 474 | E474V | |
| 479 | I479S | |
| 491 | L491Q | |
| 498 | K498N | |
| 515 | S515L | |
| 526 | P526T | |
| 529 | A529T | |
| 536 | I536F | |
| 544 | N544Y | |
| 552 | V552E | |
| 559 | V559A | |
| 560 | L560M | |
| 564 | Y564C | Y564N |
| 578 | R578P | |
| 586 | Y586F | |
| 608 | A608T | |
| 610 | M610I | |
| 617 | E617V | |
| 619 | Q619L | |
| 620 | N620S | |
| 631 | K631E | K631R |
| 638 | G638D | |
| 650 | F650L | |
| 655 | T655A | |
| 660 | R660H | |
| 679 | G679S | |
| 686 | K686E | |
| 702 | G702D | |
| 710 | E710Q | |
| 726 | F726L | F726V |
| 736 | Y736F | |
| 738 | K738M | |
| 742 | Q742* | |

*indicates a truncation

TABLE 10
Non-limiting Examples of Amino Acid
Changes Relative to SEQ ID NO: 313*

| | Amino acid change relative |
|---|---|
| Position | to SEQ ID NO: 313 |
| 64 | R64G |
| 120 | I120V |
| 121 | P121S |
| 136 | A136V |
| 226 | M226I |
| 268 | K268S |
| 275 | F275I |
| 281 | T281A |
| 300 | S300G |
| 322 | V322G |
| 333 | T333A |
| 438 | K438E |
| 502 | F502L |
| 604 | T604N |
| 619 | C619S |
| 628 | K628E |
| 656 | A656T |
| 693 | E693G |
| 726 | Y726* |

*indicates a truncation that results in deletion of residues 726-731 in SEQ ID NO: 313

TABLE 11
Non-limiting Examples of Lanosterol Synthase Sequences

| | | Nucleic | | |
|---|---|---|---|---|
| | | Acid | | Protein |
| | | SEQ ID | | SEQ |
| Strain | Nucleotide Sequence | NO | Protein Sequence | ID NO |
| 870688 | ATGGGAATCCACGAAAGTGTGTCGAA | 61 | MGIHESVSKQFAKNGHSKY | 1 |
| | ACAGTTTGCGAAAAACGGACATTCCAA | | RSDRYGLPKTDLRRWTFHA | |
| | GTACCGCAGCGACCGATACGGCTTACC | | SDLGAQWWKYDDTTPLEE | |
| | TAAGACGGATCTGCGACGATGGACGTT | | LEKRATDYVKYSLELPGYA | |
| | CCACGCGTCCGATCTGGGGGCGCAATG | | PVTLDSKPVKNAYEAALKN | |
| | GTGGAAGTATGACGATACCACACCGCT | | WHLFASLQDPDSGAWQSE | |
| | GGAAGAGCTGGAAAAGAGGGCTACCG | | YDGPQFMSIGYVTACYFGG | |
| | ACTACGTCAAATACTCGCTGGAGCTGC | | NEIPTPVKTEMIRYIVNTAH | |
| | CGGGATACGCGCCCGTGACTCTGGACT | | PVDGGWGLHKEDKSTCFG | |
| | CCAAGCCCGTGAAAAATGCCTACGAA | | TSINYVVLRLLGLSRDHPVC | |
| | GCGGCTCTCAAAAACTGGCATCTGTTT | | VKARKTLLTKFGGAINNPH | |
| | GCGTCGCTGCAAGACCCCGACTCCGGC | | WGKTWLSILNLYKWEGVN | |
| | GCGTGGCAGAGCGAATACGACGGACC | | PAPGELWLLPYFVPVHPGR | |
| | GCAGTTCATGAGCATCGGCTATGTGAC | | WWVHTRWIYLAMGYLEA | |
| | GGCGTGCTACTTTGGCGGCAACGAGAT | | AEAQCELTPLLEELRDEIYK | |
| | CCCCACGCCGGTCAAAACCGAAATGAT | | KPYSEIDFSKHCNSISGVDL | |
| | CAGATACATTGTCAACACAGCCCACCC | | YYPHTGLLKFGNALLRRYR | |
| | AGTTGACGGAGGCTGGGGCCTTCACAA | | KFRPQWIKEKVKEEIYNLC | |
| | AGAAGACAAGAGCACCTGCTTCGGTAC | | LREVSNTRHLCLAPVNNAM | |
| | CAGCATCAACTACGTGGTCCTGCGACT | | TSIVMYLHEGPDSANYKKI | |
| | ACTGGGCCTGTCACGGGACCATCCGGT | | AARWPEFLSLNPSGMFMN | |
| | CTGCGTCAAGGCGCGCAAAACGCTGCT | | GTNGLQVWDTAFAVQYAC | |
| | CACCAAGTTTGGCGGCGCCATCAACAA | | VCGFAELPQYQKTIRAAFD | |
| | CCCCCATTGGGGCAAGACCTGGCTGTC | | FLDRSQINEPTEENSYRDDR | |
| | GATTCTCAATCTCTACAAATGGGAGGG | | VGGWPFSTKTQGYPVSDCT | |
| | TGTGAATCCGGCCCCTGGCGAGCTCTG | | AEALKAIIMVQNTPGYEDL | |
| | GCTGTTGCCCTACTTTGTTCCTGTTCAT | | KKQVSDKRKHTAIDLLLGM | |
| | CCGGGCCGATGGTGGGTCCATACCCGG | | QNVGSFEPGSFASYEPIRAS | |
| | TGGATCTACCTTGCCATGGGCTATCTG | | SMLEKINPAEVFGNIMVEY | |
| | GAGGCTGCGGAGGCCCAATGCGAACT | | PYVECTDSVVLGLSYFRKY | |
| | CACTCCGTTGCTGGAGGAGCTCCGAGA | | HDYRNEDVDRAISAAIGYII | |
| | CGAAATCTACAAAAAGCCCTACTCGGA | | REQQPDGGFFGSWGVCYC | |
| | GATTGATTTCTCCAAACATTGCAACTC | | YAHMFAMEALETQNLNYN | |
| | CATCTCCGGAGTCGACCTCTACTATCC | | NCSTVQKACDFLAGYQEA | |
| | CCACACCGGCCTTTTGAAGTTTGGCAA | | DGGWAEDFKSCETQMYVR | |
| | CGCGCTTCTCCGACGATACCGCAAGTT | | GPHSLVVPTAMALLSLMSG | |
| | CAGACCGCAGTGGATCAAAGAAAAGG | | RYPQEDKIHAAARFLMSKQ | |
| | TCAAGGAGGAAATTTACAACTTGTGCC | | MSNGEWLKEEMEGVFNHT | |
| | TTCGAGAGGTTTCCAACACACGACACT | | CAIEYPNYRFYFVMKALGL | |
| | TGTGTCTCGCTCCCGTCAACAATGCCA | | YFKGYCQ | |
| | TGACCTCCATTGTCATGTATCTCCATGA | | | |
| | GGGGCCCGATTCGGCGAATTACAAAA | | | |
| | AGATTGCGGCCCGATGGCCCGAATTTC | | | |
| | TGTCTCTGAATCCGTCGGGAATGTTTA | | | |
| | TGAACGGCACCAACGGTCTCCAGGTCT | | | |
| | GGGATACTGCGTTTGCCGTGCAATACG | | | |
| | CGTGTGTTTGTGGCTTTGCCGAACTTCC | | | |
| | CCAGTACCAGAAGACGATCCGAGCGG | | | |
| | CGTTTGATTTTCTCGATCGGTCCCAGAT | | | |
| | CAACGAGCCGACGGAGGAAAATTCCT | | | |
| | ATCGAGACGACCGCGTCGGAGGATGG | | | |
| | CCCTTTAGTACCAAGACCCAGGGGTAT | | | |
| | CCGGTCTCCGACTGTACTGCCGAGGCT | | | |
| | CTCAAGGCCATCATCATGGTCCAGAAT | | | |
| | ACGCCTGGATACGAGGATCTGAAGAA | | | |
| | ACAAGTGTCTGACAAGCGGAAACACA | | | |
| | CTGCCATCGATCTACTTTTGGGAATGC | | | |
| | AGAACGTGGGCTCGTTTGAACCGGGCT | | | |
| | CTTTCGCCTCCTATGAGCCTATCCGGG | | | |
| | CGTCGTCCATGCTGGAGAAGATCAATC | | | |
| | CGGCCGAGGTGTTTGGAAACATCATGG | | | |
| | TGGAGTATCCGTACGTGGAATGCACTG | | | |
| | ATTCTGTTGTTCTGGGTCTCTCCTACTT | | | |
| | TCGAAAGTACCACGATTACCGCAACGA | | | |
| | AGACGTGGACCGAGCCATCTCTGCTGC | | | |
| | CATTGGATACATTATTCGAGAGCAGCA | | | |
| | GCCTGACGGCGGCTTCTTTGGCTCCTG | | | |
| | GGGCGTGTGCTACTGCTACGCTCACAT | | | |
| | GTTTGCCATGGAGGCTCTGGAGACGCA | | | |
| | GAATCTCAACTATAACAACTGTTCCAC | | | |
| | GGTTCAAAAGGCGTGCGACTTTCTGGC | | | |
| | GGGCTACCAGGAAGCAGATGGAGGCT | | | |
| | GGGCCGAGGACTTTAAGTCGTGCGAGA | | | |
| | CCCAGATGTACGTGCGCGGACCCCATT | | | |
| | CGCTGGTCGTGCCTACTGCCATGGCCC | | | |
| | TGTTGAGTTTGATGAGTGGTCGGTATC | | | |
| | CCCAGGAGGACAAGATTCATGCTGCGG | | | |
| | CCCGGTTTCTCATGAGCAAGCAGATGA | | | |
| | GCAACGGTGAGTGGCTCAAGGAGGAG | | | |
| | ATGGAGGGGGTGTTTAACCATACTTGT | | | |
| | GCCATTGAGTATCCCAACTACCGGTTT | | | |
| | TATTTTGTCATGAAGGCTTTGGGGTTGT | | | |
| | ATTTCAAGGGATATTGCCAGTGA | | | |
| 907808 | ATGGGAATCCACGAAAGTGTGTCGAA | 62 | MGIHESVSKQFAKNGHSKY | 83 |
| | ACAGTTTGCGAAAAACGGACATTCCAA | | RSDRYGLPKTDLRRWTFHA | |
| | GTACCGCAGCGACCGATACGGCTTACC | | SDLGAQWWKYDDTTPLEE | |
| | TAAGACGGATCTGCGACGATGGACGTT | | LEKRATDYVKYSLELPGYA | |
| | CCACGCGTCCGATCTGGGGGCGCAATG | | PVTLDSKPVKNAYEAALKN | |
| | GTGGAAGTATGACGATACCACACCGCT | | WHLFASLQDPDSGAWQSE | |
| | GGAAGAGTTGGAAAAGAGGGCTACCG | | YDGPQFMSIGYVTACYFGG | |
| | ACTACGTCAAATACTCGCTGGAGCTGC | | NEIPTPVKTEMIRYIVNTAH | |
| | CGGGATACGCGCCCGTGACTCTGGACT | | PVDGGWGLHKEDKSTCFG | |
| | CCAAGCCCGTGAAAAATGCCTACGAA | | TSINYVVLRLLGLSRDHPVC | |
| | GCGGCTCTCAAAAACTGGCATCTGTTT | | VKACKTLLTKFGGAINNPH | |
| | GCGTCGCTGCAAGACCCCGACTCCGGC | | WGKTWLSILNLYKWEGVN | |
| | GCATGGCAGTCGGAATACGACGGACC | | PAPGELWLLPYFVPVHPGR | |
| | GCAGTTCATGTCGATCGGTTATGTGAC | | WWVHTRWIYLAMGYLEA | |
| | GGCGTGCTACTTTGGCGGCAACGAGAT | | AEAQCELTPLLEELRDEIYK | |
| | CCCCACGCCGGTCAAAACCGAAATGAT | | KPYSEIGFSKHCITISGVDLY | |
| | CAGATACATTGTCAACACAGCCCACCC | | YPHTGLLKFGNALLRRYRK | |
| | AGTTGACGGAGGCTGGGGCCTTCACAA | | FRPQWIKEKVKEEIYNLCLR | |
| | AGAAGACAAGAGCACCTGTTTCGGTAC | | EVSNTRHLCLAPVNNAMTS | |
| | CAGCATCAACTACGTGGTCCTGCGACT | | IVMYLHEGPDSANYKKIAA | |
| | ACTGGGCCTGTCGCGGGATCATCCGGT | | RWPEFLSLNPSGMFMNGTN | |
| | CTGCGTCAAGGCGTGCAAAACGCTGCT | | GLQVWDTAFAVQYACVCG | |
| | CACCAAGTTTGGCGGCGCCATCAACAA | | FAELPQYQKTIRAAFDFLDR | |
| | CCCCCATTGGGGCAAGACCTGGCTGTC | | SQINEPTEENSYRDDRVGG | |
| | GATTCTCAATCTCTACAAATGGGAGGG | | WPFSTKTQGYPVSDCTAEA | |
| | TGTGAATCCGGCCCCTGGCGAGCTCTG | | LKAIIMVQNTPGYEDLKKQ | |
| | GCTGTTGCCCTACTTTGTTCCTGTTCAT | | VSDKRKHTAIDLLLGMQNV | |
| | CCGGGCCGATGGTGGGTCCATACCCGG | | GSFEPGSFASYEPIRASSML | |
| | TGGATCTACCTTGCCATGGGCTATCTG | | EKINPAEVFGNIMVEYPYV | |
| | GAGGCTGCGGAGGCCCAATGCGAACT | | ECTDSVVLGLSYFRKYHDY | |
| | CACTCCGTTGCTGGAGGAGCTCCGAGA | | RNEDVDRAISAAIGYIIREQ | |
| | CGAAATCTACAAAAAGCCCTACTCGGA | | QPDGGFFGSWGVCYCYAH | |
| | GATTGGTTTCTCCAAACATTGCATCAC | | MFAMEALETQSLNYNNCST | |
| | CATCTCCGGAGTCGACCTCTACTATCC | | VQKACDFLAGYQEADGGW | |
| | CCACACCGGCCTTTTGAAGTTTGGCAA | | AEDFKSCETQMYVRGPHSL | |
| | CGCGCTTCTCCGACGATACCGCAAGTT | | VVPTAMALLSLMSGRYPQE | |
| | CAGACCGCAGTGGATCAAAGAAAAGG | | DKIHAAARFLMSKQMSNG | |
| | TCAAGGAGGAAATTTATAACTTGTGCC | | EWLKEEMEGVFNHTCAIEY | |
| | TTCGAGAGGTTTCCAACACACGACACT | | PNYRFYFVMKALGLFFKGY | |
| | TGTGTCTCGCTCCCGTCAACAATGCCA | | CQ | |
| | TGACCTCCATTGTCATGTATCTCCATGA | | | |
| | GGGGCCCGATTCGGCGAATTACAAAA | | | |
| | AGATTGCGGCCCGATGGCCCGAATTTC | | | |
| | TGTCTCTGAATCCGTCGGGAATGTTTA | | | |
| | TGAACGGCACCAACGGTCTGCAGGTCT | | | |
| | GGGATACTGCGTTTGCCGTGCAATACG | | | |
| | CGTGTGTTTGTGGCTTTGCCGAACTTCC | | | |
| | CCAGTACCAGAAGACGATCCGAGCGG | | | |
| | CGTTTGATTTTCTCGATCGGTCCCAGAT | | | |
| | CAACGAGCCGACGGAGGAAAATTCCT | | | |
| | ATCGAGACGACCGCGTCGGAGGATGG | | | |
| | CCCTTTAGTACCAAGACCCAGGGGTAT | | | |
| | CCAGTCTCCGACTGTACTGCCGAGGCT | | | |
| | CTCAAGGCCATCATCATGGTCCAGAAT | | | |
| | ACGCCTGGATACGAGGATCTGAAGAA | | | |
| | ACAAGTGTCTGACAAGCGGAAACACA | | | |
| | CTGCCATCGATCTACTTTTGGGAATGC | | | |
| | AGAACGTGGGCTCGTTTGAACCGGGCT | | | |
| | CTTTCGCCTCCTATGAGCCTATCCGGG | | | |
| | CGTCGTCCATGCTGGAGAAGATCAATC | | | |
| | CGGCCGAGGTGTTTGGAAACATCATGG | | | |
| | TGGAGTATCCGTACGTGGAATGCACTG | | | |
| | ATTCTGTTGTTCTGGGTCTGTCCTACTT | | | |
| | TCGAAAGTACCACGATTACCGCAACGA | | | |
| | AGACGTGGACCGAGCCATCTCTGCTGC | | | |
| | CATTGGATACATTATTCGAGAGCAGCA | | | |
| | GCCTGACGGCGGCTTCTTTGGCTCCTG | | | |
| | GGGCGTGTGCTACTGCTACGCTCACAT | | | |
| | GTTTGCCATGGAGGCTCTGGAGACGCA | | | |
| | GAGTCTCAACTATAACAACTGTTCCAC | | | |
| | GGTTCAAAAGGCGTGCGACTTTCTGGC | | | |
| | GGGCTACCAGGAAGCAGATGGAGGCT | | | |
| | GGGCCGAGGACTTTAAGTCGTGCGAGA | | | |
| | CTCAGATGTACGTGCGCGGACCCCATT | | | |
| | CGCTGGTCGTGCCTACTGCCATGGCCC | | | |
| | TGTTGAGTTTGATGAGTGGTCGGTATC | | | |
| | CCCAGGAGGACAAGATTCATGCTGCGG | | | |
| | CCCGGTTTCTCATGAGCAAGCAGATGA | | | |
| | GCAACGGTGAGTGGCTCAAGGAGGAG | | | |
| | ATGGAGGGGGTGTTTAACCATACTTGT | | | |
| | GCCATTGAGTATCCCAACTACCGGTTT | | | |
| | TATTTTGTCATGAAGGCTTTGGGGTTGT | | | |
| | TTTTCAAGGGATATTGCCAGTGA | | | |
| 948806 | ATGGGAATCCACGAAAGTGTGTCGAA | 63 | MGIHESVSKQFAKNGHSKY | 84 |
| | ACAGTTTGCGAAAAACGGACATTCCAA | | RSDRYGLPKTDLRRWTFHA | |
| | GTACCGCAGCGACCGATACGGCTTACC | | SDLGAQWWKYDDTTPLEE | |
| | TAAGACGGATCTGCGACGATGGACGTT | | LEKRATDYVKYSLELPGYA | |
| | CCACGCGTCCGATCTGGGGGCGCAATG | | PVTLDSKPVKNAYEAALKN | |
| | GTGGAAGTATGACGATACCACACCGCT | | WHLFASLQDPDSGAWQSE | |
| | GGAAGAGCTGGAAAAGAGGGCTACCG | | YDGPQFMSIGYVTACYFGG | |
| | ACTACGTCAAATACTCGCTGGAGCTGC | | NEIPTPVKTEMIRYIVNTAH | |
| | CGGGATACGCGCCCGTGACTCTGGACT | | PVDGGWGLHKEDKSTCFG | |
| | CCAAGCCCGTGAAAAATGCCTACGAA | | TSNNYVVLRLLGLSRDHPV | |
| | GCGGCTCTCAAAAACTGGCATCTGTTT | | CVKARKTLLTKFGGAINNP | |
| | GCGTCGCTGCAAGACCCCGACTCCGGC | | HWGKTWLSILNLYKWEGV | |
| | GCATGGCAGTCGGAATACGACGGACC | | NPAPGELWLLPYFVPVHPG | |
| | GCAGTTCATGTCGATCGGTTATGTGAC | | RWWVHTRWIYLAMGYLE | |
| | GGCGTGCTACTTTGGCGGCAACGAGAT | | AAEAQCELTPLLEELRDEIY | |
| | CCCCACGCCGGTCAAAACCGAAATGAT | | KKPYSEIDFSKHCNSISGVD | |
| | CAGATACATTGTCAACACAGCCCACCC | | LYYPHTGLLKFGNALLRRY | |
| | AGTTGACGGAGGCTGGGGCCTTCACAA | | RKFRPQWIKEKVKEEIYNL | |
| | AGAAGACAAGAGCACCTGTTTCGGTAC | | CLREVSNTRHLCLAPVNNA | |
| | CAGCAACAACTACGTGGTCCTGCGACT | | MTSIVMYLHEGPDSANYKK | |
| | ACTGGGCCTGTCACGGGATCATCCGGT | | IAARWPEFLSLNPSGMFMN | |
| | CTGCGTCAAGGCGCGCAAAACGCTGCT | | GTNGLQVWDTAFAVQYAS | |
| | CACCAAGTTTGGCGGCGCCATCAACAA | | VCGFAELPQYQKTIRAAFD | |
| | CCCCCATTGGGGCAAGACCTGGCTGTC | | FLDRSQINEPTEENSYRDDR | |
| | GATTCTCAATCTCTACAAATGGGAGGG | | VGGWPFSTKTQGYPVSDCT | |
| | TGTGAATCCGGCCCCTGGCGAGCTCTG | | AEALKAIIMVQNTPGYEDL | |
| | GCTGTTGCCCTACTTTGTTCCTGTTCAT | | KKQVSDKRKHTAIDLLLGM | |
| | CCGGGCCGATGGTGGGTCCATACCCGG | | QNVGSFEPGSFASYEPIRAS | |
| | TGGATCTACCTTGCCATGGGCTATCTG | | SMLEKINPAEVFGNIMVEY | |
| | GAGGCTGCGGAGGCCCAATGCGAACT | | PYVECTDSVVMGLSYFRKY | |
| | CACTCCGTTGCTGGAGGAGCTCCGAGA | | HDYRNEDVDRAISAAIGYII | |
| | CGAAATCTACAAAAAGCCCTACTCGGA | | REQQPDGGFFGSWGVCYC | |
| | GATTGATTTCTCCAAACATTGCAACTC | | YAHMFAMEALETQNLNYN | |
| | CATCTCCGGAGTCGACCTCTACTATCC | | NCSTVQKACDFLAGYQEA | |
| | CCACACCGGCCTTTTGAAGTTTGGCAA | | DGGWAEDFKSCETQMYVR | |
| | CGCGCTTCTCCGACGATACCGCAAGTT | | GPHSLVVPTAMALLSLMSS | |
| | CAGACCGCAGTGGATCAAAGAAAAGG | | RYPQEDKIHAAARFLMSKQ | |
| | TCAAGGAGGAAATTTACAACTTGTGCC | | MSNGEWLKEEMEGVFNHT | |
| | TTCGAGAGGTTTCCAACACACGACACT | | CAIEYPNYRFYFVMKALGL | |
| | TGTGTCTCGCTCCCGTCAACAATGCCA | | YFKGYCQ | |
| | TGACCTCCATTGTCATGTATCTCCATGA | | | |
| | GGGGCCCGATTCGGCGAATTACAAAA | | | |
| | AGATTGCGGCCCGATGGCCCGAATTTC | | | |
| | TGTCTCTGAATCCGTCGGGAATGTTTA | | | |
| | TGAACGGCACCAACGGTCTGCAGGTCT | | | |
| | GGGATACTGCGTTTGCCGTGCAATACG | | | |
| | CGAGTGTTTGTGGCTTTGCCGAACTTC | | | |
| | CCCAGTACCAGAAGACGATCCGAGCG | | | |
| | GCGTTTGATTTTCTCGATCGGTCCCAG | | | |
| | ATCAACGAGCCGACGGAGGAAAATTC | | | |
| | CTATCGAGACGACCGCGTCGGAGGATG | | | |
| | GCCCTTTAGTACCAAGACCCAGGGGTA | | | |
| | TCCAGTCTCCGACTGTACTGCCGAGGC | | | |
| | TCTCAAGGCCATCATCATGGTCCAGAA | | | |
| | TACGCCTGGATACGAGGATCTGAAGAA | | | |
| | ACAAGTGTCTGACAAGCGGAAACACA | | | |
| | CTGCCATCGATCTACTTTTGGGAATGC | | | |
| | AGAACGTGGGCTCGTTTGAACCGGGCT | | | |
| | CTTTCGCCTCCTATGAGCCTATCCGGG | | | |
| | CGTCGTCCATGCTGGAGAAGATCAATC | | | |
| | CGGCCGAGGTGTTTGGAAACATCATGG | | | |
| | TGGAGTATCCGTACGTGGAATGCACTG | | | |
| | ATTCTGTTGTTATGGGTCTGTCCTACTT | | | |
| | TCGAAAGTACCACGATTACCGCAACGA | | | |
| | AGACGTGGACCGAGCCATCTCTGCTGC | | | |
| | CATTGGATACATTATTCGAGAGCAGCA | | | |
| | GCCTGACGGCGGCTTCTTTGGCTCCTG | | | |
| | GGGCGTGTGCTACTGCTACGCTCACAT | | | |
| | GTTTGCCATGGAGGCTCTGGAGACGCA | | | |
| | GAATCTCAACTATAACAACTGTTCCAC | | | |
| | GGTTCAAAAGGCGTGCGACTTTCTGGC | | | |
| | GGGCTACCAGGAAGCAGATGGAGGCT | | | |
| | GGGCCGAGGACTTTAAGTCGTGCGAGA | | | |
| | CTCAGATGTACGTGCGCGGACCCCATT | | | |
| | CGCTGGTCGTGCCTACTGCCATGGCCC | | | |
| | TGTTGAGTTTGATGAGTAGTCGGTATC | | | |
| | CCCAGGAGGACAAGATTCATGCTGCGG | | | |
| | CCCGGTTTCTCATGAGCAAGCAGATGA | | | |
| | GCAACGGTGAGTGGCTCAAGGAGGAG | | | |
| | ATGGAGGGGGTGTTTAACCATACTTGT | | | |
| | GCCATTGAGTATCCCAACTACCGGTTT | | | |
| | TATTTTGTCATGAAGGCTTTGGGGTTGT | | | |
| | ATTTCAAGGGATATTGCCAGTGA | | | |
| 948810 | ATGGGAATCCACGAAAGTGTGTCGAA | 64 | MGIHESVSKQFAKNGHSKY | 85 |
| | ACAGTTTGCGAAAAACGGACATTCCAA | | RSDRYGLPKTDLRRWTFHA | |
| | GTACCGCAGCGACCGATACGGCTTACC | | SDLGAQWWKYDDTTPLEE | |
| | TAAGACGGATCTGCGACGATGGACGTT | | LEKRATDYVKYSLELPGYA | |
| | CCACGCGTCCGATCTGGGGGCGCAATG | | PVTLDSKPVKNAYEAALKN | |
| | GTGGAAGTATGACGATACCACACCGCT | | WHLFASLQDPDSGAWQSE | |
| | GGAAGAGCTGGAAAAGAGGGCTACCG | | YDGPQFMSIGYVTACYFGG | |
| | ACTACGTCAAATACTCGCTGGAGCTGC | | NEIPTPVKTEMIRYIVNTAH | |
| | CGGGATACGCGCCCGTGACTCTGGACT | | PVDGGWGLHKEDKSTCFG | |
| | CCAAGCCCGTGAAAAATGCCTACGAA | | TSINYVVLRLLGLSRDHPVC | |
| | GCGGCTCTCAAAAACTGGCATCTGTTT | | VKARKTLLTKFGGAINNPH | |
| | GCGTCGCTGCAAGACCCCGACTCCGGC | | WGKTWLSILNLYKWEGVN | |
| | GCATGGCAGTCGGAATACGACGGACC | | PAPGELWLLPYFVPVHPGR | |
| | GCAGTTCATGTCGATCGGTTATGTGAC | | WWVHTRWIYLAMGYLEA | |
| | GGCGTGCTACTTTGGCGGCAACGAGAT | | AEAQCELTPLLEELRDEIYK | |
| | CCCCACGCCGGTCAAAACCGAAATGAT | | KPYSEIDFSKHCNSISGVDL | |
| | CAGATACATTGTCAACACAGCCCACCC | | YYPHTGLLKFGNALLRRYR | |
| | AGTTGACGGAGGCTGGGGCCTTCACAA | | KFRPQWIKEKVKEEIYNLC | |
| | AGAAGACAAGAGCACCTGTTTCGGTAC | | LREVSNTRHLCLAPVNNAM | |
| | CAGCATCAACTACGTGGTCCTGCGACT | | TSIVMYLHEGPDSANYKKI | |
| | ACTGGGCCTGTCACGGGATCATCCGGT | | AARWPEFLSLNPSGMFMN | |
| | CTGCGTCAAGGCGCGCAAAACGCTGCT | | GTNGLQVWDTAFAVQYAC | |
| | CACCAAGTTTGGCGGCGCCATCAACAA | | VCGFAELPQYQKTIRAASD | |
| | CCCCCATTGGGGCAAGACCTGGCTGTC | | FLDRSQINEPTEENSYRDGR | |
| | GATTCTCAATCTCTACAAATGGGAGGG | | VGGWPFSTKTQGYPVSDCT | |
| | TGTGAATCCGGCCCCTGGCGAGCTCTG | | AEALKAIIMVQNTPGYEDL | |
| | GCTGTTGCCCTACTTTGTTCCTGTTCAT | | KKQVSDKRKHTAIDLLLGM | |
| | CCGGGCCGATGGTGGGTCCATACCCGG | | QNVGSFEPGSFASYEPIRAS | |
| | TGGATCTACCTTGCCATGGGCTATCTG | | SMLEKFNPAEVFGNIMVEY | |
| | GAGGCTGCGGAGGCCCAATGCGAACT | | PYVECTDSVVLGLSYFRKY | |
| | CACTCCGTTGCTGGAGGAGCTCCGAGA | | HDYRNEDVDRAISAAIGYII | |
| | CGAAATCTACAAAAAGCCCTACTCGGA | | REQQPDGGFFGSWGVCYC | |
| | GATTGATTTCTCCAAACATTGCAACTC | | YAHMFAMEALETQNLNYN | |
| | CATCTCCGGAGTCGACCTCTACTATCC | | NCSTVQKACDFLAGYQEA | |
| | CCACACCGGCCTTTTGAAGTTTGGCAA | | DGGWAEDFKSCETQMYVR | |
| | CGCGCTTCTCCGACGATACCGCAAGTT | | GPHSLVVPTAMALLSLMSG | |
| | CAGACCGCAGTGGATCAAAGAAAAGG | | RYPQEDKIHAAARFLMSKQ | |
| | TCAAGGAGGAAATTTACAACTTGTGCC | | MSNGEWLKEEMEGVFNHT | |
| | TTCGAGAGGTTTCCAACACACGACACT | | CAIEYPNYRFYFVMKALGL | |
| | TGTGTCTCGCTCCCGTCAACAATGCCA | | YFKGYCQ | |
| | TGACCTCCATTGTCATGTATCTCCATGA | | | |
| | GGGGCCCGATTCGGCGAATTACAAAA | | | |
| | AGATTGCGGCCCGATGGCCCGAATTTC | | | |
| | TGTCTCTGAATCCGTCGGGAATGTTTA | | | |
| | TGAACGGCACCAACGGTCTGCAGGTCT | | | |
| | GGGATACTGCGTTTGCCGTGCAATACG | | | |
| | CGTGTGTTTGTGGCTTTGCCGAACTTCC | | | |
| | CCAGTACCAGAAGACGATCCGAGCGG | | | |
| | CGTCTGATTTTCTCGATCGGTCCCAGAT | | | |
| | CAACGAGCCGACGGAGGAAAATTCCT | | | |
| | ATCGAGACGGCCGCGTCGGAGGATGG | | | |
| | CCCTTTAGTACCAAGACCCAGGGGTAT | | | |
| | CCAGTCTCCGACTGTACTGCCGAGGCT | | | |
| | CTCAAGGCCATCATCATGGTCCAGAAT | | | |
| | ACGCCTGGATACGAGGATCTGAAGAA | | | |
| | ACAAGTGTCTGACAAGCGGAAACACA | | | |
| | CTGCCATCGATCTACTTTTGGGAATGC | | | |
| | AGAACGTGGGCTCGTTTGAACCGGGCT | | | |
| | CTTTCGCCTCCTATGAGCCTATCCGGG | | | |
| | CGTCGTCCATGCTGGAGAAGTTCAATC | | | |
| | CGGCCGAGGTGTTTGGAAACATCATGG | | | |
| | TGGAGTATCCGTACGTGGAATGCACTG | | | |
| | ATTCTGTTGTTCTGGGTCTGTCCTACTT | | | |
| | TCGAAAGTACCACGATTACCGCAACGA | | | |
| | AGACGTGGACCGAGCCATCTCTGCTGC | | | |
| | CATTGGATACATTATTCGAGAGCAGCA | | | |
| | GCCTGACGGTGGCTTCTTTGGCTCCTG | | | |
| | GGGCGTGTGCTACTGCTACGCTCACAT | | | |
| | GTTTGCCATGGAGGCTCTGGAGACGCA | | | |
| | GAATCTCAACTATAACAACTGTTCCAC | | | |
| | GGTTCAAAAGGCGTGCGACTTTCTGGC | | | |
| | GGGCTACCAGGAAGCAGATGGAGGCT | | | |
| | GGGCCGAGGACTTTAAGTCGTGCGAGA | | | |
| | CCCAGATGTACGTGCGCGGACCCCATT | | | |
| | CGCTGGTCGTGCCTACTGCCATGGCCC | | | |
| | TGTTGAGTTTGATGAGTGGTCGGTATC | | | |
| | CCCAGGAGGACAAGATTCATGCTGCGG | | | |
| | CCCGGTTTCTCATGAGCAAGCAGATGA | | | |
| | GCAACGGTGAGTGGCTCAAGGAGGAG | | | |
| | ATGGAGGGGGTGTTTAACCATACTTGT | | | |
| | GCCATTGAGTATCCCAACTACCGGTTT | | | |
| | TATTTTGTCATGAAGGCTTTGGGGTTGT | | | |
| | ATTTCAAGGGATATTGCCAGTGA | | | |
| 948821 | ATGGGAATCCACGAAAGTGTGTCGAA | 65 | MGIHESVSKQFAKNGHSKY | 86 |
| | ACAGTTTGCGAAAAACGGACATTCCAA | | RSDRYGLPKTDLRRWTFHA | |
| | GTACCGCAGCGACCGATACGGCTTACC | | SDLGAQWWKYDDTTPLEE | |
| | TAAGACGGATCTGCGACGATGGACGTT | | LEKRATDYVKYSLELPGYA | |
| | CCACGCGTCCGATCTGGGGGCGCAATG | | PVTLDSKPVNNAYEAALKN | |
| | GTGGAAGTATGACGATACCACACCGCT | | WHLFASLQDPDSGAWQSE | |
| | GGAAGAGCTGGAAAAGAGGGCTACCG | | YDGPQFMSIGYVTACYFGG | |
| | ACTACGTCAAATACTCGCTGGAGCTGC | | NEIPTPVKTEMIRYIVNTAH | |
| | CGGGATACGCGCCCGTGACTCTGGACT | | PVDGGWSLHKEDKSTCFGT | |
| | CCAAGCCCGTGAATAATGCCTACGAAG | | SINYVVLRLLGLSRDHPVC | |
| | CGGCTCTCAAAAACTGGCATCTGTTTG | | VKARKTLLTKFGGAINNPH | |
| | CGTCGCTGCAAGACCCCGACTCCGGCG | | WGKTWLSILNLYKWEGVN | |
| | CATGGCAGTCGGAATACGACGGACCG | | PAPGELWLLPYFVPVHPGR | |
| | CAGTTCATGTCGATCGGTTATGTGACG | | WWVHTRWIYLAMGYLEA | |
| | GCATGCTACTTTGGCGGCAACGAGATC | | AEAQCELTPLLEELRDEIYK | |
| | CCCACGCCGGTCAAAACCGAAATGATC | | KPYSEIDFSKHCNSISGVDL | |
| | AGATACATTGTCAACACAGCCCACCCA | | YYPHTGLLKFGNALLRRYR | |
| | GTTGACGGAGGCTGGAGCCTTCACAAA | | KFRPQWIKEKVKEEIYNLC | |
| | GAAGACAAGAGCACCTGTTTCGGTACC | | LREVSNTRHLCLAPVNNAM | |
| | AGCATCAACTACGTGGTCCTGCGACTA | | TSIVMYLHEGPDSANYKKI | |
| | CTGGGCCTGTCACGGGATCATCCGGTC | | AARWPEFLSLNPSGMFMN | |
| | TGCGTCAAGGCGCGCAAAACGCTGCTC | | GTNGLQVWDTAFAVQYAC | |
| | ACCAAGTTTGGCGGCGCCATCAACAAC | | VCGFAELPQYQKTIRAAFD | |
| | CCCCATTGGGGCAAGACCTGGCTGTCG | | FLDRSQINEPTEENSYRDDR | |
| | ATTCTCAATCTCTACAAATGGGAGGGT | | VGGWPFSTKTQGYPVSDCT | |
| | GTGAATCCGGCCCCTGGCGAGCTCTGG | | AEALKAIIMVQNTPGYEDL | |
| | CTGTTGCCCTACTTTGTTCCTGTTCATC | | KKQVSDKRKHTAIDLLLGM | |
| | CGGGCCGATGGTGGGTCCATACCCGGT | | QNVGSFEPGSFASYEPIRAS | |
| | GGATCTACCTTGCCATGGGCTATCTGG | | SMLEKINPAEVFGNIMVEY | |
| | AGGCTGCGGAGGCCCAATGCGAACTC | | PYVECTDSVVLGLSYFRKY | |
| | ACTCCGTTGCTGGAGGAGCTCCGAGAC | | HDYRNEDVDRAISAAIGYII | |
| | GAAATCTACAAAAAGCCCTACTCGGAG | | REQQPDGGFFGSWGVCYC | |
| | ATTGATTTCTCCAAACATTGCAACTCC | | YAHMFAMEALETQNLNYN | |
| | ATCTCCGGAGTCGACCTCTACTATCCC | | NCSTVQKACDFLAGYQEA | |
| | CACACCGGCCTTTTGAAGTTTGGCAAC | | DGGWAEDFKSCETQMYVR | |
| | GCGCTTCTCCGACGATACCGCAAGTTC | | GPHSLVVPTAMALLSLMSG | |
| | AGACCGCAGTGGATCAAAGAAAAGGT | | RYPQEDKIHAAARFLMSKQ | |
| | CAAGGAGGAAATTTACAACTTGTGCCT | | MSNGEWLKEEMEGVFNHT | |
| | TCGAGAGGTTTCCAACACACGACACTT | | CAIEYPNYRFYFVMKALGL | |
| | GTGTCTCGCTCCCGTCAACAATGCCAT | | YFKGYCQ | |
| | GACCTCCATTGTCATGTATCTCCATGA | | | |
| | GGGGCCCGATTCGGCGAATTACAAAA | | | |
| | AGATTGCGGCCCGATGGCCCGAATTTC | | | |
| | TGTCTCTGAATCCGTCGGGAATGTTTA | | | |
| | TGAACGGCACCAACGGTCTCCAGGTCT | | | |
| | GGGATACTGCGTTTGCCGTGCAATACG | | | |
| | CGTGTGTTTGTGGCTTTGCCGAACTTCC | | | |
| | CCAGTACCAGAAGACGATCCGAGCGG | | | |
| | CGTTTGATTTTCTCGATCGGTCCCAGAT | | | |
| | CAACGAGCCGACGGAGGAAAATTCCT | | | |
| | ATCGAGACGACCGCGTCGGAGGATGG | | | |
| | CCCTTTAGTACCAAGACCCAGGGGTAT | | | |
| | CCGGTCTCCGACTGTACTGCCGAGGCT | | | |
| | CTCAAGGCCATCATCATGGTCCAGAAT | | | |
| | ACGCCTGGATACGAGGATCTGAAGAA | | | |
| | ACAAGTGTCTGACAAGCGGAAACACA | | | |
| | CTGCCATCGATCTACTTTTGGGAATGC | | | |
| | AGAACGTGGGCTCGTTTGAACCGGGCT | | | |
| | CTTTCGCCTCCTATGAGCCTATCCGGG | | | |
| | CGTCGTCCATGCTGGAGAAGATCAATC | | | |
| | CGGCCGAGGTGTTTGGAAACATCATGG | | | |
| | TGGAGTATCCGTACGTGGAATGCACTG | | | |
| | ATTCTGTTGTTCTGGGTCTCTCCTACTT | | | |
| | TCGAAAGTACCACGATTACCGCAACGA | | | |
| | AGACGTGGACCGAGCCATCTCTGCTGC | | | |
| | CATTGGATACATTATTCGAGAGCAGCA | | | |
| | GCCTGACGGCGGCTTCTTTGGCTCCTG | | | |
| | GGGCGTGTGCTACTGCTACGCTCACAT | | | |
| | GTTTGCCATGGAGGCTCTGGAGACGCA | | | |
| | GAATCTCAACTATAACAACTGTTCCAC | | | |
| | GGTTCAAAAGGCGTGCGACTTTCTGGC | | | |
| | GGGCTACCAGGAAGCAGATGGAGGCT | | | |
| | GGGCCGAGGACTTTAAGTCGTGCGAGA | | | |
| | CCCAGATGTACGTGCGCGGACCCCATT | | | |
| | CGCTGGTCGTGCCTACTGCCATGGCCC | | | |
| | TGTTGAGTTTGATGAGTGGTCGGTATC | | | |
| | CCCAGGAGGACAAGATTCATGCTGCGG | | | |
| | CCCGGTTTCTCATGAGCAAGCAGATGA | | | |
| | GCAACGGTGAGTGGCTCAAGGAGGAG | | | |
| | ATGGAGGGGGTGTTTAACCATACTTGT | | | |
| | GCCATTGAGTATCCCAACTACCGGTTT | | | |
| | TATTTTGTCATGAAGGCTTTGGGGTTGT | | | |
| | ATTTCAAGGGATATTGCCAGTGA | | | |
| 948822 | ATGGGAATCCACGAAAGTGTGTCGAA | 66 | MGIHESVSKQFAKNGHSKY | 87 |
| | ACAGTTTGCGAAAAACGGACATTCCAA | | RSDRYGLPKTDLRRWTFHA | |
| | GTACCGCAGCGACCGATACGGCTTACC | | SDLGAQWWKYDDTTPLEE | |
| | TAAGACGGATCTGCGACGATGGACGTT | | LEKRATDYVKYSLELPGYA | |
| | CCACGCGTCCGATCTGGGGGCGCAATG | | PVTLDSKPVKNAYEAALKN | |
| | GTGGAAGTATGACGATACCACACCGCT | | WHLFASLQDPDSGAWQSE | |
| | GGAAGAGCTGGAAAAGAGGGCTACCG | | YDGPQFMSIGYVTACYFGG | |
| | ACTACGTCAAATACTCGCTGGAGCTGC | | NEIPTPVKTEMIRYIVNTAH | |
| | CGGGATACGCGCCCGTGACTCTGGACT | | PVDGGWGLHKEDKSTCFG | |
| | CCAAGCCCGTGAAAAATGCCTACGAA | | TSINYVVLRLLGLSRDHPVC | |
| | GCGGCTCTCAAAAACTGGCATCTGTTT | | VKARKTLVTKFGGAINNPH | |
| | GCGTCGCTGCAAGACCCCGACTCCGGC | | WGKTWLSILNLYKWEGVN | |
| | GCATGGCAGTCGGAATACGACGGACC | | PAPGELWLLPYFVPVHPGR | |
| | GCAGTTCATGTCGATCGGTTATGTGAC | | WWVHTRWIYLAMGYLEA | |
| | GGCGTGCTACTTTGGCGGCAACGAGAT | | AEAQCELTPLLEELRDEIYI | |
| | CCCCACGCCGGTCAAAACCGAAATGAT | | KPYSEIDFSKHCNSISGVDL | |
| | CAGATACATTGTCAACACAGCCCACCC | | YYPHTGLLKFGSALLRRYR | |
| | AGTTGACGGAGGCTGGGGCCTTCACAA | | KFRPQWIKEKVKEEIYNLC | |
| | AGAAGACAAGAGCACCTGTTTCGGTAC | | LREVSNTRHLCLAPVNNAM | |
| | CAGCATCAACTACGTGGTCCTGCGACT | | TSIVMYLHEGLDSANYKKI | |
| | ACTGGGCCTGTCACGGGATCATCCGGT | | AARWPEFLSLNPSGMFMN | |
| | CTGCGTCAAGGCGCGCAAAACGCTGGT | | GTNGLQVWDTAFAVQYAC | |
| | CACCAAGTTTGGCGGCGCCATCAACAA | | VCGFAELPQYQKTIRAAFD | |
| | CCCCCATTGGGGCAAGACCTGGCTGTC | | FLDRSQINEPTEENSYRDDR | |
| | GATTCTCAATCTCTACAAATGGGAGGG | | VGGWPFSTKTQGYPVSDCT | |
| | TGTGAATCCGGCCCCTGGCGAGCTCTG | | AEALKAIIMVQNTPGYEDL | |
| | GCTGTTGCCCTACTTTGTTCCTGTTCAT | | KKQVSDKRKHTAIDLLLGM | |
| | CCGGGCCGATGGTGGGTCCATACCCGG | | QNVGSFEPGSFASYEPIRAS | |
| | TGGATCTACCTTGCCATGGGCTATCTG | | SMLEKINPAEVFGNIMVEY | |
| | GAGGCTGCGGAGGCCCAATGCGAACT | | PYVECTDSVVLGLSYFRKY | |
| | CACTCCGTTGCTGGAGGAGCTCCGAGA | | HDYRNEDVDRAISAAIGYII | |
| | CGAAATCTACATAAAGCCCTACTCGGA | | REQQPDGGFFGSWGVCYC | |
| | GATTGATTTCTCCAAACATTGCAACTC | | YAHMFAMEALETQNLNYN | |
| | CATCTCCGGAGTCGACCTCTACTATCC | | NCSTVQKACDFLAGYQEA | |
| | CCACACCGGCCTTTTGAAGTTTGGCAG | | DGGWAEDFKSCETQMYVR | |
| | CGCGCTTCTCCGACGATACCGCAAGTT | | GPHSLVVPTAMALLSLMSG | |
| | CAGACCGCAGTGGATCAAAGAAAAGG | | RYPQEDKIHAAARFLMSKQ | |
| | TCAAGGAGGAAATTTACAACTTGTGCC | | MSNGEWLKEEMEGVFNHT | |
| | TTCGAGAGGTTTCCAACACACGACACT | | CAIEYPNYRFYFVMKALGL | |
| | TGTGTCTCGCTCCCGTCAACAATGCCA | | YFKGYCQ | |
| | TGACCTCCATTGTCATGTATCTCCATGA | | | |
| | GGGGCTCGATTCGGCGAATTACAAAAA | | | |
| | GATTGCGGCCCGATGGCCCGAATTTCT | | | |
| | GTCTCTGAATCCGTCGGGAATGTTTAT | | | |
| | GAACGGCACCAACGGTCTGCAGGTCTG | | | |
| | GGATACTGCGTTTGCCGTGCAATACGC | | | |
| | GTGTGTTTGTGGCTTTGCCGAACTTCCC | | | |
| | CAGTACCAGAAGACGATCCGAGCGGC | | | |
| | GTTTGATTTTCTCGATCGGTCCCAGATC | | | |
| | AACGAGCCGACGGAGGAAAATTCCTA | | | |
| | TCGAGACGACCGCGTCGGAGGATGGC | | | |
| | CCTTTAGTACCAAGACCCAGGGGTATC | | | |
| | CAGTCTCCGACTGTACTGCCGAGGCTC | | | |
| | TCAAGGCCATCATCATGGTCCAGAATA | | | |
| | CGCCTGGATACGAGGATCTGAAGAAA | | | |
| | CAAGTGTCTGACAAGCGGAAACACACT | | | |
| | GCCATCGATCTACTTTTGGGAATGCAG | | | |
| | AACGTGGGCTCGTTTGAACCGGGCTCT | | | |
| | TTCGCCTCCTATGAGCCTATCCGGGCG | | | |
| | TCGTCCATGCTGGAGAAGATCAATCCG | | | |
| | GCCGAGGTGTTTGGAAACATCATGGTG | | | |
| | GAGTATCCGTACGTGGAATGCACTGAT | | | |
| | TCTGTTGTTCTGGGTCTGTCCTACTTTC | | | |
| | GAAAGTACCACGATTACCGCAACGAA | | | |
| | GACGTGGACCGAGCCATCTCTGCTGCC | | | |
| | ATTGGATATATTATTCGAGAGCAGCAG | | | |
| | CCTGACGGCGGCTTCTTTGGCTCCTGG | | | |
| | GGCGTGTGCTACTGCTACGCTCACATG | | | |
| | TTTGCCATGGAGGCTCTGGAGACGCAG | | | |
| | AATCTCAACTATAACAACTGTTCCACG | | | |
| | GTTCAAAAGGCGTGCGACTTTCTGGCG | | | |
| | GGCTACCAGGAAGCAGATGGAGGCTG | | | |
| | GGCCGAGGACTTTAAGTCGTGCGAGAC | | | |
| | CCAGATGTACGTGCGCGGACCCCATTC | | | |
| | GCTGGTCGTGCCTACTGCCATGGCCCT | | | |
| | GTTGAGTTTGATGAGTGGTCGGTATCC | | | |
| | CCAGGAGGACAAGATTCATGCTGCGGC | | | |
| | CCGGTTTCTCATGAGCAAGCAGATGAG | | | |
| | CAACGGTGAGTGGCTCAAGGAGGAGA | | | |
| | TGGAGGGGGTGTTTAACCATACTTGTG | | | |
| | CCATTGAGTATCCCAACTACCGGTTTT | | | |
| | ATTTTGTCATGAAGGCTTTGGGGTTGT | | | |
| | ATTTCAAGGGATATTGCCAGTGA | | | |
| 948823 | ATGGGAATCCACGAAAGTGTGTCGAA | 63 | MGIHESVSKQFAKNGHSKY | 84 |
| | ACAGTTTGCGAAAAACGGACATTCCAA | | RSDRYGLPKTDLRRWTFHA | |
| | GTACCGCAGCGACCGATACGGCTTACC | | SDLGAQWWKYDDTTPLEE | |
| | TAAGACGGATCTGCGACGATGGACGTT | | LEKRATDYVKYSLELPGYA | |
| | CCACGCGTCCGATCTGGGGGCGCAATG | | PVTLDSKPVKNAYEAALKN | |
| | GTGGAAGTATGACGATACCACACCGCT | | WHLFASLQDPDSGAWQSE | |
| | GGAAGAGCTGGAAAAGAGGGCTACCG | | YDGPQFMSIGYVTACYFGG | |
| | ACTACGTCAAATACTCGCTGGAGCTGC | | NEIPTPVKTEMIRYIVNTAH | |
| | CGGGATACGCGCCCGTGACTCTGGACT | | PVDGGWGLHKEDKSTCFG | |
| | CCAAGCCCGTGAAAAATGCCTACGAA | | TSNNYVVLRLLGLSRDHPV | |
| | GCGGCTCTCAAAAACTGGCATCTGTTT | | CVKARKTLLTKFGGAINNP | |
| | GCGTCGCTGCAAGACCCCGACTCCGGC | | HWGKTWLSILNLYKWEGV | |
| | GCATGGCAGTCGGAATACGACGGACC | | NPAPGELWLLPYFVPVHPG | |
| | GCAGTTCATGTCGATCGGTTATGTGAC | | RWWVHTRWIYLAMGYLE | |
| | GGCGTGCTACTTTGGCGGCAACGAGAT | | AAEAQCELTPLLEELRDEIY | |
| | CCCCACGCCGGTCAAAACCGAAATGAT | | KKPYSEIDFSKHCNSISGVD | |
| | CAGATACATTGTCAACACAGCCCACCC | | LYYPHTGLLKFGNALLRRY | |
| | AGTTGACGGAGGCTGGGGCCTTCACAA | | RKFRPQWIKEKVKEEIYNL | |
| | AGAAGACAAGAGCACCTGTTTCGGTAC | | CLREVSNTRHLCLAPVNNA | |
| | CAGCAACAACTACGTGGTCCTGCGACT | | MTSIVMYLHEGPDSANYKK | |
| | ACTGGGCCTGTCACGGGATCATCCGGT | | IAARWPEFLSLNPSGMFMN | |
| | CTGCGTCAAGGCGCGCAAAACGCTGCT | | GTNGLQVWDTAFAVQYAS | |
| | CACCAAGTTTGGCGGCGCCATCAACAA | | VCGFAELPQYQKTIRAAFD | |
| | CCCCCATTGGGGCAAGACCTGGCTGTC | | FLDRSQINEPTEENSYRDDR | |
| | GATTCTCAATCTCTACAAATGGGAGGG | | VGGWPFSTKTQGYPVSDCT | |
| | TGTGAATCCGGCCCCTGGCGAGCTCTG | | AEALKAIIMVQNTPGYEDL | |
| | GCTGTTGCCCTACTTTGTTCCTGTTCAT | | KKQVSDKRKHTAIDLLLGM | |
| | CCGGGCCGATGGTGGGTCCATACCCGG | | QNVGSFEPGSFASYEPIRAS | |
| | TGGATCTACCTTGCCATGGGCTATCTG | | SMLEKINPAEVFGNIMVEY | |
| | GAGGCTGCGGAGGCCCAATGCGAACT | | PYVECTDSVVMGLSYFRKY | |
| | CACTCCGTTGCTGGAGGAGCTCCGAGA | | HDYRNEDVDRAISAAIGYII | |
| | CGAAATCTACAAAAAGCCCTACTCGGA | | REQQPDGGFFGSWGVCYC | |
| | GATTGATTTCTCCAAACATTGCAACTC | | YAHMFAMEALETQNLNYN | |
| | CATCTCCGGAGTCGACCTCTACTATCC | | NCSTVQKACDFLAGYQEA | |
| | CCACACCGGCCTTTTGAAGTTTGGCAA | | DGGWAEDFKSCETQMYVR | |
| | CGCGCTTCTCCGACGATACCGCAAGTT | | GPHSLVVPTAMALLSLMSS | |
| | CAGACCGCAGTGGATCAAAGAAAAGG | | RYPQEDKIHAAARFLMSKQ | |
| | TCAAGGAGGAAATTTACAACTTGTGCC | | MSNGEWLKEEMEGVFNHT | |
| | TTCGAGAGGTTTCCAACACACGACACT | | CAIEYPNYRFYFVMKALGL | |
| | TGTGTCTCGCTCCCGTCAACAATGCCA | | YFKGYCQ | |
| | TGACCTCCATTGTCATGTATCTCCATGA | | | |
| | GGGGCCCGATTCGGCGAATTACAAAA | | | |
| | AGATTGCGGCCCGATGGCCCGAATTTC | | | |
| | TGTCTCTGAATCCGTCGGGAATGTTTA | | | |
| | TGAACGGCACCAACGGTCTGCAGGTCT | | | |
| | GGGATACTGCGTTTGCCGTGCAATACG | | | |
| | CGAGTGTTTGTGGCTTTGCCGAACTTC | | | |
| | CCCAGTACCAGAAGACGATCCGAGCG | | | |
| | GCGTTTGATTTTCTCGATCGGTCCCAG | | | |
| | ATCAACGAGCCGACGGAGGAAAATTC | | | |
| | CTATCGAGACGACCGCGTCGGAGGATG | | | |
| | GCCCTTTAGTACCAAGACCCAGGGGTA | | | |
| | TCCAGTCTCCGACTGTACTGCCGAGGC | | | |
| | TCTCAAGGCCATCATCATGGTCCAGAA | | | |
| | TACGCCTGGATACGAGGATCTGAAGAA | | | |
| | ACAAGTGTCTGACAAGCGGAAACACA | | | |
| | CTGCCATCGATCTACTTTTGGGAATGC | | | |
| | AGAACGTGGGCTCGTTTGAACCGGGCT | | | |
| | CTTTCGCCTCCTATGAGCCTATCCGGG | | | |
| | CGTCGTCCATGCTGGAGAAGATCAATC | | | |
| | CGGCCGAGGTGTTTGGAAACATCATGG | | | |
| | TGGAGTATCCGTACGTGGAATGCACTG | | | |
| | ATTCTGTTGTTATGGGTCTGTCCTACTT | | | |
| | TCGAAAGTACCACGATTACCGCAACGA | | | |
| | AGACGTGGACCGAGCCATCTCTGCTGC | | | |
| | CATTGGATACATTATTCGAGAGCAGCA | | | |
| | GCCTGACGGCGGCTTCTTTGGCTCCTG | | | |
| | GGGCGTGTGCTACTGCTACGCTCACAT | | | |
| | GTTTGCCATGGAGGCTCTGGAGACGCA | | | |
| | GAATCTCAACTATAACAACTGTTCCAC | | | |
| | GGTTCAAAAGGCGTGCGACTTTCTGGC | | | |
| | GGGCTACCAGGAAGCAGATGGAGGCT | | | |
| | GGGCCGAGGACTTTAAGTCGTGCGAGA | | | |
| | CTCAGATGTACGTGCGCGGACCCCATT | | | |
| | CGCTGGTCGTGCCTACTGCCATGGCCC | | | |
| | TGTTGAGTTTGATGAGTAGTCGGTATC | | | |
| | CCCAGGAGGACAAGATTCATGCTGCGG | | | |
| | CCCGGTTTCTCATGAGCAAGCAGATGA | | | |
| | GCAACGGTGAGTGGCTCAAGGAGGAG | | | |
| | ATGGAGGGGGTGTTTAACCATACTTGT | | | |
| | GCCATTGAGTATCCCAACTACCGGTTT | | | |
| | TATTTTGTCATGAAGGCTTTGGGGTTGT | | | |
| | ATTTCAAGGGATATTGCCAGTGA | | | |
| 948825 | ATGGGAATCCACGAAAGTGTGTCGAA | 68 | MGIHESVSKQFAKNGHSKY | 89 |
| | ACAGTTTGCGAAAAACGGACATTCCAA | | RSDRYGLPKTDLRRWTFHA | |
| | GTACCGCAGCGACCGATACGGCTTACC | | SDLGAQWWKYDDTTPLEE | |
| | TAAGACGGATCTGCGACGATGGACGTT | | LEKRATDYVKYSLELPGYA | |
| | CCACGCGTCCGATCTGGGGGCGCAATG | | PVTLDSKPVKNAYEAALKN | |
| | GTGGAAGTATGACGATACCACACCGCT | | WHLFASLQDPDSGAWQSE | |
| | GGAAGAGCTGGAAAAGAGGGCTACCG | | YDGPQFMSIGYVTACYFGG | |
| | ACTACGTCAAATACTCGCTGGAGCTGC | | NEIPTPVKTEMIRYIVNTAH | |
| | CGGGATACGCGCCCGTGACTCTGGACT | | PVDGGWGLHKEDKSTCFG | |
| | CCAAGCCCGTGAAAAATGCCTACGAA | | TSNNYVVLRLLGLSRDHPV | |
| | GCGGCTCTCAAAAACTGGCATCTGTTT | | CVKARKTLLTKFGGAINNP | |
| | GCGTCGCTGCAAGACCCCGACTCCGGC | | HWGKTWLSILNLYKWEGV | |
| | GCATGGCAGTCGGAATACGACGGACC | | NPAPGELWLLPYFVPVHPG | |
| | GCAGTTCATGTCGATCGGTTATGTGAC | | RWWVHTRWIYLAMGYLE | |
| | GGCGTGCTACTTTGGCGGCAACGAGAT | | AAEAQCELTPLLEELRDEIY | |
| | CCCCACGCCGGTCAAAACCGAAATGAT | | KKPYSEIDFSKHCNSISGVD | |
| | CAGATACATTGTCAACACAGCCCACCC | | LYYPHTGLLKFGNALLRRY | |
| | AGTTGACGGAGGCTGGGGCCTTCACAA | | RKFRPQWIKEKVKEEIYNL | |
| | AGAAGACAAGAGCACCTGTTTCGGTAC | | CLREVSNTRHLCLAPVNNA | |
| | CAGCAACAACTACGTGGTCCTGCGACT | | MTSIVMYLHEGPDSANYKK | |
| | ACTGGGCCTGTCACGGGATCATCCGGT | | IAARWPEFLSLNPSGMFMN | |
| | CTGCGTCAAGGCGCGCAAAACGCTGCT | | GTNGLQVWDTAFAVQYAS | |
| | CACCAAGTTTGGCGGCGCCATCAACAA | | VCGFAELPQYQKTIRAAFD | |
| | CCCCCATTGGGGCAAGACCTGGCTGTC | | FLDRSQINEPTEENSYRDDR | |
| | GATTCTCAATCTCTACAAATGGGAGGG | | VGGWPFSTKTQGYPVSDCT | |
| | TGTGAATCCGGCCCCTGGCGAGCTCTG | | AEALKAIIMVQNTPGYEDL | |
| | GCTGTTGCCCTACTTTGTTCCTGTTCAT | | KKQVSDKRKHTAIDLLLGM | |
| | CCGGGCCGATGGTGGGTCCATACCCGG | | QNVGSFEPGSFASYEPIRAS | |
| | TGGATCTACCTTGCCATGGGCTATCTG | | SMLEKINPAEVFGNIMVEY | |
| | GAGGCTGCGGAGGCCCAATGCGAACT | | PYVECTDSVVMGLSYFRKY | |
| | CACTCCGTTGCTGGAGGAGCTCCGAGA | | HDYRNEDVDRAISAAIGYII | |
| | CGAAATCTACAAAAAGCCCTACTCGGA | | REQQPDGGFFGSWGVCYC | |
| | GATTGATTTCTCCAAACATTGCAACTC | | YAHMFAMEALETQNLNYN | |
| | CATCTCCGGAGTCGACCTCTACTATCC | | NCSTVQKACDFLAGYQEA | |
| | CCACACCGGCCTTTTGAAGTTTGGCAA | | DGGWAEDFKSCETQMYVR | |
| | CGCGCTTCTCCGACGATACCGCAAGTT | | GPHSLVVPTAMALLSLMSG | |
| | CAGACCGCAGTGGATCAAAGAAAAGG | | RYPQEDKIHAAARFLMSKQ | |
| | TCAAGGAGGAAATTTACAACTTGTGCC | | MSNGEWLKEEMEGVFNHT | |
| | TTCGAGAGGTTTCCAACACACGACACT | | CAIEYPNYRFYFVMKALGL | |
| | TGTGTCTCGCTCCCGTCAACAATGCCA | | YFKGYCQ | |
| | TGACCTCCATTGTCATGTATCTCCATGA | | | |
| | GGGGCCCGATTCGGCGAATTACAAAA | | | |
| | AGATTGCGGCCCGATGGCCCGAATTTC | | | |
| | TGTCTCTGAATCCGTCGGGAATGTTTA | | | |
| | TGAACGGCACCAACGGTCTGCAGGTCT | | | |
| | GGGATACTGCGTTTGCCGTGCAATACG | | | |
| | CGAGTGTTTGTGGCTTTGCCGAACTTC | | | |
| | CCCAGTACCAGAAGACGATCCGAGCG | | | |
| | GCGTTTGATTTTCTCGATCGGTCCCAG | | | |
| | ATCAACGAGCCGACGGAGGAAAATTC | | | |
| | CTATCGAGACGACCGCGTCGGAGGATG | | | |
| | GCCCTTTAGTACCAAGACCCAGGGGTA | | | |
| | TCCAGTCTCCGACTGTACTGCCGAGGC | | | |
| | TCTCAAGGCCATCATCATGGTCCAGAA | | | |
| | TACGCCTGGATACGAGGATCTGAAGAA | | | |
| | ACAAGTGTCTGACAAGCGGAAACACA | | | |
| | CTGCCATCGATCTACTTTTGGGAATGC | | | |
| | AGAACGTGGGCTCGTTTGAACCGGGCT | | | |
| | CTTTCGCCTCCTATGAGCCTATCCGGG | | | |
| | CGTCGTCCATGCTGGAGAAGATCAATC | | | |
| | CGGCCGAGGTGTTTGGAAACATCATGG | | | |
| | TGGAGTATCCGTACGTGGAATGCACTG | | | |
| | ATTCTGTTGTTATGGGTCTGTCCTACTT | | | |
| | TCGAAAGTACCACGATTACCGCAACGA | | | |
| | AGACGTGGACCGAGCCATCTCTGCTGC | | | |
| | CATTGGATACATTATTCGAGAGCAGCA | | | |
| | GCCTGACGGCGGCTTCTTTGGCTCCTG | | | |
| | GGGCGTGTGCTACTGCTACGCTCACAT | | | |
| | GTTTGCCATGGAGGCTCTGGAGACGCA | | | |
| | GAATCTCAACTATAACAACTGTTCCAC | | | |
| | GGTTCAAAAGGCGTGCGACTTTCTGGC | | | |
| | GGGCTACCAGGAAGCAGATGGAGGCT | | | |
| | GGGCCGAGGACTTTAAGTCGTGCGAGA | | | |
| | CCCAGATGTACGTGCGCGGACCCCATT | | | |
| | CGCTGGTCGTGCCTACTGCCATGGCCC | | | |
| | TGTTGAGTTTGATGAGTGGTCGGTATC | | | |
| | CCCAGGAGGACAAGATTCATGCTGCGG | | | |
| | CCCGGTTTCTCATGAGCAAGCAGATGA | | | |
| | GCAACGGTGAGTGGCTCAAGGAGGAG | | | |
| | ATGGAGGGGGTGTTTAACCATACTTGT | | | |
| | GCCATTGAGTATCCCAACTACCGGTTT | | | |
| | TATTTTGTCATGAAGGCTTTGGGGTTGT | | | |
| | ATTTCAAGGGATATTGCCAGTGA | | | |
| 950865 | ATGGGAATCCACGAAAGTGTGTCGAA | 69 | MGIHESVSKQFAKNGHSKY | 90 |
| | ACAGTTTGCGAAAAACGGACATTCCAA | | RSDRYGLPKTDLRRWTFHA | |
| | GTACCGCAGCGACCGATACGGCTTACC | | SDLGAQWWKYDDTTPLEE | |
| | TAAGACGGATCTGCGACGATGGACGTT | | LEKRATDYVKYSLELPGYA | |
| | CCACGCGTCCGATCTGGGGGCGCAATG | | PVTLDSKPVKNAYEAALKN | |
| | GTGGAAGTATGACGATACCACACCGCT | | WHLFASLQDPDSGAWQSE | |
| | GGAAGAGCTGGAAAAGAGGGCTACCG | | YDGPQFMSIGYVTACYFGG | |
| | ACTACGTCAAATACTCGCTGGAGCTGC | | NEIPTPVKTEMIRYIVNTAH | |
| | CGGGATACGCGCCCGTGACTCTGGACT | | PVDGGWGLHKEDKSTCFG | |
| | CCAAGCCCGTGAAAAATGCCTACGAA | | TSINYVVLRLLGLSRDHPVC | |
| | GCGGCTCTCAAAAACTGGCATCTGTTT | | VKARKTLLTKFGGAINNPH | |
| | GCGTCGCTGCAAGACCCCGACTCCGGC | | WGKTWLSILNLYKWEGVN | |
| | GCGTGGCAGAGCGAATACGACGGACC | | PAPGELWLLPYFVPVHPGR | |
| | GCAGTTCATGAGCATCGGCTATGTGAC | | WWVHTRWIYLAMGYLEA | |
| | GGCGTGCTACTTTGGCGGCAACGAGAT | | AEAQCELTPLLEELRDEIYK | |
| | CCCCACGCCGGTCAAAACCGAAATGAT | | KPYSEIDFSKHCNSISGVDL | |
| | CAGATACATTGTCAACACAGCCCACCC | | YYPHTGLLKFGNALLRRYR | |
| | AGTTGACGGAGGCTGGGGCCTTCACAA | | KFRPQWIKEKVKEEIYNLC | |
| | AGAAGACAAGAGCACCTGCTTCGGTAC | | LREVSNTRHLCLAPVNNAM | |
| | CAGCATCAACTACGTGGTCCTGCGACT | | TSIVMYLHEGPVSANYKKI | |
| | ACTGGGCCTGTCACGGGACCATCCGGT | | AARWPEFLSLNPSGMFMN | |
| | CTGCGTCAAGGCGCGCAAAACGCTGCT | | GTNGLQVWDTAFAVQYAC | |
| | CACCAAGTTTGGCGGCGCCATCAACAA | | VCGFAELPQYQKTIRAAFD | |
| | CCCCCATTGGGGCAAGACCTGGCTGTC | | FLDRSQINEPTEENSYRDDR | |
| | GATTCTCAATCTCTACAAATGGGAGGG | | VGGWPFSTKTQGYPVSDCT | |
| | TGTGAATCCGGCCCCTGGCGAGCTCTG | | AEALKAIIMVQNTPGYEDL | |
| | GCTGTTGCCCTACTTTGTTCCTGTTCAT | | KKQVSDKRKHTAIDLLLGM | |
| | CCGGGCCGATGGTGGGTCCATACCCGG | | QNVGSFEPGSFASYEPIRAS | |
| | TGGATCTACCTTGCCATGGGCTATCTG | | SMLEKINPAEVFGNIMVEY | |
| | GAGGCTGCGGAGGCCCAATGCGAACT | | PYVECTDSVVLGLSYFRKY | |
| | CACTCCGTTGCTGGAGGAGCTCCGAGA | | HDYRNEDVDRAISAAIGYII | |
| | CGAAATCTACAAAAAGCCCTACTCGGA | | REQQPDGGFFGSWGVCYC | |
| | GATTGATTTCTCCAAACATTGCAACTC | | YAHIFAMEALETQNLNYNN | |
| | CATCTCCGGAGTCGACCTCTACTATCC | | CSTVQKACDFLAGYQEAD | |
| | CCACACCGGCCTTTTGAAGTTTGGCAA | | GGWAEDFKSCETQMYVRG | |
| | CGCGCTTCTCCGACGATACCGCAAGTT | | PHSLVVPTAMALLSLMSGR | |
| | CAGACCGCAGTGGATCAAAGAAAAGG | | YPQEDKIHAAARFLMSKQ | |
| | TCAAGGAGGAAATTTACAACTTGTGCC | | MSNDEWLKEEMEGVFNHT | |
| | TTCGAGAGGTTTCCAACACACGACACT | | CAIEYPNYRFYFVMKALGL | |
| | TGTGTCTCGCTCCCGTCAACAATGCCA | | YFKGYCQ | |
| | TGACCTCCATTGTCATGTATCTCCATGA | | | |
| | GGGGCCCGTTTCGGCGAATTACAAAAA | | | |
| | GATTGCGGCCCGATGGCCCGAATTTCT | | | |
| | GTCTCTGAATCCGTCGGGAATGTTTAT | | | |
| | GAACGGCACCAACGGTCTGCAGGTCTG | | | |
| | GGATACTGCGTTTGCCGTGCAATACGC | | | |
| | GTGTGTTTGTGGCTTTGCCGAACTTCCC | | | |
| | CAGTACCAGAAGACGATCCGAGCGGC | | | |
| | GTTTGATTTTCTCGATCGGTCCCAGATC | | | |
| | AACGAGCCGACGGAGGAAAATTCCTA | | | |
| | TCGAGACGACCGCGTCGGAGGATGGC | | | |
| | CCTTTAGTACCAAGACCCAGGGGTATC | | | |
| | CAGTCTCCGACTGTACTGCCGAGGCTC | | | |
| | TCAAGGCCATCATCATGGTCCAGAATA | | | |
| | CGCCTGGATACGAGGATCTGAAGAAA | | | |
| | CAAGTGTCTGACAAGCGGAAACACACT | | | |
| | GCCATCGATCTACTTTTGGGAATGCAG | | | |
| | AACGTGGGCTCGTTTGAACCGGGCTCT | | | |
| | TTCGCCTCCTATGAGCCTATCCGGGCG | | | |
| | TCGTCCATGCTGGAGAAGATCAATCCG | | | |
| | GCCGAGGTGTTTGGAAACATCATGGTG | | | |
| | GAGTATCCGTACGTGGAATGCACTGAT | | | |
| | TCTGTTGTTCTGGGTCTGTCCTACTTTC | | | |
| | GAAAGTACCACGATTACCGCAACGAA | | | |
| | GACGTGGACCGAGCCATCTCTGCTGCC | | | |
| | ATTGGATACATTATTCGAGAGCAGCAG | | | |
| | CCTGACGGCGGCTTCTTTGGCTCCTGG | | | |
| | GGCGTGTGCTACTGCTACGCTCACATA | | | |
| | TTTGCCATGGAGGCTCTGGAGACGCAG | | | |
| | AATCTCAACTATAACAACTGTTCCACG | | | |
| | GTTCAAAAGGCGTGCGACTTTCTGGCG | | | |
| | GGCTACCAGGAAGCAGATGGAGGCTG | | | |
| | GGCCGAGGACTTTAAGTCGTGCGAGAC | | | |
| | TCAGATGTACGTGCGCGGACCCCATTC | | | |
| | GCTGGTCGTGCCTACTGCCATGGCCCT | | | |
| | GTTGAGTTTGATGAGTGGTCGGTATCC | | | |
| | CCAGGAGGACAAGATTCATGCTGCGGC | | | |
| | CCGGTTTCTCATGAGCAAGCAGATGAG | | | |
| | CAACGATGAGTGGCTCAAGGAGGAGA | | | |
| | TGGAGGGGGTGTTTAACCATACTTGTG | | | |
| | CCATTGAGTATCCCAACTACCGGTTTT | | | |
| | ATTTTGTCATGAAGGCTTTGGGGTTGT | | | |
| | ATTTCAAGGGATATTGCCAGTGA | | | |
| 950866 | ATGGGAATCCACGAAAGTGTGTCGAA | 70 | MGIHESVSKQFAKNGHSKY | 91 |
| | ACAGTTTGCGAAAAACGGACATTCCAA | | RSDRYGLPKTDLRRWTFHA | |
| | GTACCGCAGCGACCGATACGGCTTACC | | SDLGAQWWKYDDTTPLEE | |
| | TAAGACGGATCTGCGACGATGGACGTT | | LEKRATDYVKYSLELPGYA | |
| | CCACGCGTCCGATCTGGGGGCGCAATG | | PVTLDSKPVKNAYEAALKN | |
| | GTGGAAGTATGACGATACCACACCGCT | | WHLFASLQDPDSGAWQSE | |
| | GGAAGAGCTGGAAAAGAGGGCTACCG | | YDGPQFMSIGYVTACYFGG | |
| | ACTACGTCAAATACTCGCTGGAGCTGC | | NEIPTPVKTEMIRYIVNTAH | |
| | CGGGATACGCGCCCGTGACTCTGGACT | | PVDGGWGLHKEDKSTCFG | |
| | CCAAGCCCGTGAAAAATGCCTACGAA | | TSINYVVLRLLGLSRDHPVC | |
| | GCGGCTCTCAAAAACTGGCATCTGTTT | | VKARKTLLTKFGGAINNPH | |
| | GCGTCGCTGCAAGACCCCGACTCCGGC | | WGKTWLSILNLYKWEGVN | |
| | GCGTGGCAGAGCGAATACGACGGACC | | PAPGELWLLPYFVPVHPGR | |
| | GCAGTTCATGAGCATCGGCTATGTGAC | | WWVHTRWIYLAMGYLEA | |
| | GGCGTGCTACTTTGGCGGCAACGAGAT | | AEAQCELTPLLEELRDEIYK | |
| | CCCCACGCCGGTCAAAACCGAAATGAT | | KPYSEIDFSKHCNSISGVDL | |
| | CAGATACATTGTCAACACAGCCCACCC | | YYPHTGLLKFGNALLRRYR | |
| | AGTTGACGGAGGCTGGGGCCTTCACAA | | KFRPQWIKEKVKEEIYNLC | |
| | AGAAGACAAGAGCACCTGCTTCGGTAC | | LREVSNTRHLCLAPVNNAM | |
| | CAGCATCAACTACGTGGTCCTGCGACT | | TSIVMYLHEGPVSANYKKI | |
| | ACTGGGCCTGTCACGGGACCATCCGGT | | AARWPEFLSLNPSGMFMN | |
| | CTGCGTCAAGGCGCGCAAAACGCTGCT | | GTNGLQVWDTAFAVQYAC | |
| | CACCAAGTTTGGCGGCGCCATCAACAA | | VCGFAELPQYQKTIRAAFD | |
| | CCCCCATTGGGGCAAGACCTGGCTGTC | | FLDRSQINEPTEENSYRDDR | |
| | GATTCTCAATCTCTACAAATGGGAGGG | | VGGWPFSTKTQGYPVSDCT | |
| | TGTGAATCCGGCCCCTGGCGAGCTCTG | | AEALKAIIMVQNTPGYEDL | |
| | GCTGTTGCCCTACTTTGTTCCTGTTCAT | | KKQVSDNRKHTAIDLLLGM | |
| | CCGGGCCGATGGTGGGTCCATACCCGG | | QNVGSFEPGSFASYEPIRAS | |
| | TGGATCTACCTTGCCATGGGCTATCTG | | SMLEKINPAEVFGNIMVEY | |
| | GAGGCTGCGGAGGCCCAATGCGAACT | | PYVECTDSVVLGLSYFRKY | |
| | CACTCCGTTGCTGGAGGAGCTCCGAGA | | HDYRNEDVDRAISAAIGYII | |
| | CGAAATCTACAAAAAGCCCTACTCGGA | | REQQPDGGFFGSWGVCYC | |
| | GATTGATTTCTCCAAACATTGCAACTC | | YAHIFAMEALETQNLNYNN | |
| | CATCTCCGGAGTCGACCTCTACTATCC | | CSTVQKACDFLAGYQEAD | |
| | CCACACCGGCCTTTTGAAGTTTGGCAA | | GGWAEDFKSCETQMYVRG | |
| | CGCGCTTCTCCGACGATACCGCAAGTT | | PHSLVVPTAMALLSLMSGR | |
| | CAGACCGCAGTGGATCAAAGAAAAGG | | YPQEDKIHAAARFLMSKQ | |
| | TCAAGGAGGAAATTTACAACTTGTGCC | | MSNDEWLKEEMEGVFNHT | |
| | TTCGAGAGGTTTCCAACACACGACACT | | CAIEYPNYRFYFVMKALGL | |
| | TGTGTCTCGCTCCCGTCAACAATGCCA | | YFKGYCQ | |
| | TGACCTCCATTGTCATGTATCTCCATGA | | | |
| | GGGGCCCGTTTCGGCGAATTACAAAAA | | | |
| | GATTGCGGCCCGATGGCCCGAATTTCT | | | |
| | GTCTCTGAATCCGTCGGGAATGTTTAT | | | |
| | GAACGGCACCAACGGTCTGCAGGTCTG | | | |
| | GGATACTGCGTTTGCCGTGCAATACGC | | | |
| | GTGTGTTTGTGGCTTTGCCGAACTTCCC | | | |
| | CAGTACCAGAAGACGATCCGAGCGGC | | | |
| | GTTTGATTTTCTCGATCGGTCCCAGATC | | | |
| | AACGAGCCGACGGAGGAAAATTCCTA | | | |
| | TCGAGACGACCGCGTCGGAGGATGGC | | | |
| | CCTTTAGTACCAAGACCCAGGGGTATC | | | |
| | CAGTCTCCGACTGTACTGCCGAGGCTC | | | |
| | TCAAGGCCATCATCATGGTCCAGAATA | | | |
| | CGCCTGGATACGAGGATCTGAAGAAA | | | |
| | CAAGTGTCTGACAATCGGAAACACACT | | | |
| | GCCATCGATCTACTTTTGGGAATGCAG | | | |
| | AACGTGGGCTCGTTTGAACCGGGCTCT | | | |
| | TTCGCCTCCTATGAGCCTATCCGGGCG | | | |
| | TCGTCCATGCTGGAGAAGATCAATCCG | | | |
| | GCCGAGGTGTTTGGAAACATCATGGTG | | | |
| | GAGTATCCGTACGTGGAATGCACTGAT | | | |
| | TCTGTTGTTCTGGGTCTGTCCTACTTTC | | | |
| | GAAAGTACCACGATTACCGCAACGAA | | | |
| | GACGTGGACCGAGCCATCTCTGCTGCC | | | |
| | ATTGGATACATTATTCGAGAGCAGCAG | | | |
| | CCTGACGGCGGCTTCTTTGGCTCCTGG | | | |
| | GGCGTGTGCTACTGCTACGCTCACATA | | | |
| | TTTGCCATGGAGGCTCTGGAGACGCAG | | | |
| | AATCTCAACTATAACAACTGTTCCACG | | | |
| | GTTCAAAAGGCGTGCGACTTTCTGGCG | | | |
| | GGCTACCAGGAAGCAGATGGAGGCTG | | | |
| | GGCCGAGGACTTTAAGTCGTGCGAGAC | | | |
| | TCAGATGTACGTGCGCGGACCCCATTC | | | |
| | GCTGGTCGTGCCTACTGCCATGGCCCT | | | |
| | GTTGAGTTTGATGAGTGGTCGGTATCC | | | |
| | CCAGGAGGACAAGATTCATGCTGCGGC | | | |
| | CCGGTTTCTCATGAGCAAGCAGATGAG | | | |
| | CAACGATGAGTGGCTCAAGGAGGAGA | | | |
| | TGGAGGGGGTGTTTAACCATACTTGTG | | | |
| | CCATTGAGTATCCCAACTACCGGTTTT | | | |
| | ATTTTGTCATGAAGGCTTTGGGGTTGT | | | |
| | ATTTCAAGGGATATTGCCAGTGA | | | |
| 950867 | ATGGGAATCCACGAAAGTGTGTCGAA | 71 | MGIHESVSKQFAKNGHSKY | 92 |
| | ACAGTTTGCGAAAAACGGACATTCCAA | | RSDRYGLPKTDLRRWTFHA | |
| | GTACCGCAGCGACCGATACGGCTTACC | | SDLGAQWWKYDDTTPLEE | |
| | TAAGACGGATCTGCGACGATGGACGTT | | LEKRATDYVKYSLELPGYA | |
| | CCACGCGTCCGATCTGGGGGCGCAATG | | PVTLGSKLVKNAYEAALKN | |
| | GTGGAAGTATGACGATACCACACCGCT | | WHLFASLQDPDSGAWQSE | |
| | GGAAGAGCTGGAAAAGAGGGCTACCG | | YDGPQFMSIGYVTACYFGG | |
| | ACTACGTCAAATACTCGCTGGAGCTGC | | NEIPTPVKTEMIRYIVNTAH | |
| | CGGGATACGCGCCCGTGACTCTGGGCT | | PVDGGWGLHKEDKSTCFG | |
| | CCAAGCTCGTGAAAAATGCCTACGAAG | | ASINYVVLRLLGLSRDHPV | |
| | CGGCTCTCAAAAACTGGCATCTGTTTG | | CVKARKTLLIKFGGAINNP | |
| | CGTCGCTGCAAGACCCCGACTCCGGCG | | HWGKTWLSILNLYKWEGV | |
| | CATGGCAGTCGGAATACGACGGACCG | | NPTPGELWLLPYFVPVHPG | |
| | CAGTTCATGTCGATCGGTTATGTGACG | | RWWVHTRWIYLAMGYLE | |
| | GCGTGCTACTTTGGCGGCAACGAGATC | | AAEAQCELTPLLEELRDEIY | |
| | CCCACGCCGGTCAAAACCGAAATGATC | | KKPYSEIDFSKHCNSISGVD | |
| | AGATACATTGTCAACACAGCCCACCCA | | LYYPHTGLLKFGNALLRRY | |
| | GTTGACGGAGGCTGGGGCCTTCACAAA | | RKFRPQWIKEKVKEEIYNL | |
| | GAAGACAAGAGCACCTGTTTCGGTGCC | | CLREVSNTRHLCLAPVNNA | |
| | AGCATCAACTACGTGGTCCTGCGACTA | | MTSIVMYLHEGPDSANYKK | |
| | CTGGGCCTGTCACGGGATCATCCGGTC | | IAARWPEFLSLNPSGMFMN | |
| | TGCGTCAAGGCGCGCAAAACGCTGCTC | | GTNGLQVWDTAFAVQYAC | |
| | ATCAAGTTTGGCGGCGCCATCAACAAC | | VCGFAELPQYQKTIRAAFD | |
| | CCCCATTGGGGCAAGACCTGGCTGTCG | | FLDRSQINEPTEENSYRDDR | |
| | ATTCTCAATCTCTACAAATGGGAGGGT | | VGGWPFSTKTQGYPVSDCT | |
| | GTGAATCCGACCCCTGGCGAGCTCTGG | | AEALKAIIMVQNTPGYEDL | |
| | CTGTTGCCCTACTTTGTTCCTGTTCATC | | KKQVSDKRKHTAIDLLLGM | |
| | CGGGCCGATGGTGGGTCCATACCCGGT | | QNVGSFEPGSFASYEPIRAS | |
| | GGATCTACCTTGCCATGGGCTATCTGG | | SMLEKINPAEVFGNIMVEY | |
| | AGGCTGCGGAGGCCCAATGCGAACTC | | PYVECTDSVVLGLSYFRKY | |
| | ACTCCGTTGCTGGAGGAGCTCCGAGAC | | HDYRNEDVDRAISAAIGYII | |
| | GAAATCTACAAAAAGCCCTACTCGGAG | | REQQPDGGFFGSWGVCYC | |
| | ATTGATTTCTCCAAACATTGCAACTCC | | YAHMFAMEALETQNLNYN | |
| | ATCTCCGGAGTCGACCTCTACTATCCC | | NCSTVQKACDFLAGYQEA | |
| | CACACCGGCCTTTTGAAGTTTGGCAAC | | DGGWAEDFKSCETQMYVR | |
| | GCGCTTCTCCGACGATACCGCAAGTTC | | GPHSLVVPTAMALLSLMSG | |
| | AGACCGCAGTGGATCAAAGAAAAGGT | | RYPQEDKIHAAARFLMSKQ | |
| | CAAGGAGGAAATTTACAACTTGTGCCT | | MSNGEWLKEEMEGVFNHT | |
| | TCGAGAGGTTTCCAACACACGACACTT | | CAIEYPNYRFYFVMKALGL | |
| | GTGTCTCGCTCCCGTCAACAATGCCAT | | YFKGYCQ | |
| | GACCTCCATTGTCATGTATCTCCATGA | | | |
| | GGGGCCCGATTCGGCGAATTACAAAA | | | |
| | AGATTGCGGCCCGATGGCCCGAATTTC | | | |
| | TGTCTCTGAATCCGTCGGGAATGTTTA | | | |
| | TGAACGGCACCAACGGTCTGCAGGTCT | | | |
| | GGGATACTGCGTTTGCCGTGCAATACG | | | |
| | CGTGTGTTTGTGGCTTTGCCGAACTTCC | | | |
| | CCAGTACCAGAAGACGATCCGAGCGG | | | |
| | CGTTTGATTTTCTCGATCGGTCCCAGAT | | | |
| | CAACGAGCCGACGGAGGAAAATTCCT | | | |
| | ATCGAGACGACCGCGTCGGAGGATGG | | | |
| | CCCTTTAGTACCAAGACCCAGGGGTAT | | | |
| | CCAGTCTCCGACTGTACTGCCGAGGCT | | | |
| | CTCAAGGCCATCATCATGGTCCAGAAT | | | |
| | ACGCCTGGATACGAGGATCTGAAGAA | | | |
| | ACAAGTGTCTGACAAGCGGAAACACA | | | |
| | CTGCCATCGATCTACTTTTGGGAATGC | | | |
| | AGAACGTGGGCTCGTTTGAACCGGGCT | | | |
| | CTTTCGCCTCCTATGAGCCTATCCGGG | | | |
| | CGTCGTCCATGCTGGAGAAGATCAATC | | | |
| | CGGCCGAGGTGTTTGGAAACATCATGG | | | |
| | TGGAGTATCCGTACGTGGAATGCACTG | | | |
| | ATTCTGTTGTTCTGGGTCTGTCCTACTT | | | |
| | TCGAAAGTACCACGATTACCGCAACGA | | | |
| | AGACGTGGACCGAGCCATCTCTGCTGC | | | |
| | CATTGGATACATTATTCGAGAGCAGCA | | | |
| | GCCTGACGGCGGCTTCTTTGGCTCCTG | | | |
| | GGGCGTGTGCTACTGCTACGCTCACAT | | | |
| | GTTTGCCATGGAGGCTCTGGAGACGCA | | | |
| | GAATCTCAACTATAACAACTGTTCCAC | | | |
| | GGTTCAAAAGGCGTGCGACTTTCTGGC | | | |
| | GGGCTACCAGGAAGCAGATGGAGGCT | | | |
| | GGGCCGAGGACTTTAAGTCGTGCGAGA | | | |
| | CTCAGATGTACGTGCGCGGACCCCATT | | | |
| | CGCTGGTCGTGCCTACTGCCATGGCCC | | | |
| | TGTTGAGTTTGATGAGTGGTCGGTATC | | | |
| | CCCAGGAGGACAAGATTCATGCTGCGG | | | |
| | CCCGGTTTCTCATGAGCAAGCAGATGA | | | |
| | GCAACGGTGAGTGGCTCAAGGAGGAG | | | |
| | ATGGAGGGGGTGTTTAACCATACTTGT | | | |
| | GCCATTGAGTATCCCAACTACCGGTTT | | | |
| | TATTTTGTCATGAAGGCTTTGGGGTTGT | | | |
| | ATTTCAAGGGATATTGCCAGTGA | | | |
| 950868 | ATGGGAATCCACGAAAGTGTGTCGAA | 4 | MGIHESVSKQFAKNGHSKY | 3 |
| | ACAGTTTGCGAAAAACGGACATTCCAA | | RSDRYGLPKTDLRRWTFHA | |
| | GTACCGCAGCGACCGATACGGCTTACC | | SDLGAQWWKYDGTTPLEE | |
| | TAAGACGGATCTGCGACGATGGACGTT | | LEKRATDYVRYSLELPGYA | |
| | CCACGCGTCCGATCTGGGGGCGCAATG | | PVTLDSKPVKNAYEAALKS | |
| | GTGGAAGTATGACGGTACCACACCGCT | | WHLFASLQDPDSGAWQSE | |
| | GGAAGAGCTGGAAAAGAGGGCTACCG | | YDGPQFMSIGYVTACYFGG | |
| | ACTACGTCAGATACTCGCTGGAGCTGC | | NEIPTPVKTEMIRYIVNTAH | |
| | CGGGATACGCGCCCGTGACTCTGGACT | | PVDGGWGLHKEDKSTCFG | |
| | CCAAGCCCGTGAAAAATGCCTACGAA | | TSINYVVLRLLGLSRDHPVC | |
| | GCGGCTCTCAAAAGCTGGCATCTGTTT | | VKARKTLLTKFGGAINNPH | |
| | GCGTCGCTGCAAGACCCCGACTCCGGC | | WGKTWLSILNLYKWEGVN | |
| | GCATGGCAGTCGGAATACGACGGACC | | PAPGELWLLPYFVPVHPGR | |
| | GCAGTTCATGTCGATCGGTTATGTGAC | | WWVHTRWIYLAMGYLEA | |
| | GGCGTGCTACTTTGGCGGCAACGAGAT | | AEAQCELTPLLEELRDEIYK | |
| | CCCCACGCCGGTCAAAACCGAAATGAT | | KPYSEIDFSKHCNSISGVDL | |
| | CAGATACATTGTCAACACAGCCCACCC | | YYPHTGLLKFGNALLRRYR | |
| | AGTTGACGGAGGCTGGGGCCTTCACAA | | KFRPQWIKEKVKEEIYNLC | |
| | AGAAGACAAGAGCACCTGTTTCGGTAC | | LREVSNTRHLCLAPVNNAM | |
| | CAGCATCAACTACGTGGTCCTGCGACT | | TSIVMYLHEGPDSANYKKI | |
| | ACTGGGCCTGTCACGGGATCATCCGGT | | AARWPEFLSLNPSGMFMN | |
| | CTGCGTCAAGGCGCGCAAAACGCTGCT | | GTNGLQVWDTAFAVQYAC | |
| | CACCAAGTTTGGCGGCGCCATCAACAA | | VCSFAELPQYQKTIRAAFDF | |
| | CCCCCATTGGGGCAAGACCTGGCTGTC | | LDRSQINEPTEENSYRDDRV | |
| | GATTCTCAATCTCTACAAATGGGAGGG | | GGWPFSTKTQGYPVSDCTA | |
| | TGTGAATCCGGCCCCTGGCGAGCTCTG | | EALKAIIMVQNTPGYEDLK | |
| | GCTGTTGCCCTACTTTGTTCCTGTTCAT | | KQVSDKRKHTAIDLLLGMQ | |
| | CCGGGCCGATGGTGGGTCCATACCCGG | | NVGSFEPGSFASYEPIRASS | |
| | TGGATCTACCTTGCCATGGGCTATCTG | | MLEKINPAEVFGNIMVEYP | |
| | GAGGCTGCGGAGGCCCAATGCGAACT | | YVECTDSVVLGLSYFRKYH | |
| | CACTCCGTTGCTGGAGGAGCTCCGAGA | | DYRNEDVDRAISAAIGYIIR | |
| | CGAAATCTACAAAAAGCCCTACTCGGA | | EQQPDGGFFGSWGVCYCY | |
| | GATTGATTTCTCCAAACATTGCAACTC | | AHMFAMEALVTQNLNYNN | |
| | CATCTCCGGAGTCGACCTCTACTATCC | | CSTVQKACDFLAGYQEAD | |
| | CCACACCGGCCTTTTGAAGTTTGGCAA | | GGWAEDFKSCETQMYVRG | |
| | CGCGCTTCTCCGACGATACCGCAAGTT | | PHSLVVPTAMALLSLMSGR | |
| | CAGACCGCAGTGGATCAAAGAAAAGG | | YPQEDKIHAAARFLMSKQ | |
| | TCAAGGAGGAAATTTACAACTTGTGCC | | MSNGEWLKEEMEGVFNHT | |
| | TTCGAGAGGTTTCCAACACACGACACT | | CAIEYPNYRLYFVMKALGL | |
| | TGTGTCTCGCTCCCGTCAACAATGCCA | | YFKGYCQ | |
| | TGACCTCCATTGTCATGTATCTCCATGA | | | |
| | GGGGCCCGATTCGGCGAATTACAAAA | | | |
| | AGATTGCGGCCCGATGGCCCGAATTTC | | | |
| | TGTCTCTGAATCCGTCGGGAATGTTTA | | | |
| | TGAACGGCACCAACGGTCTGCAGGTCT | | | |
| | GGGATACTGCGTTTGCCGTGCAATACG | | | |
| | CGTGTGTTTGTAGCTTTGCCGAACTTCC | | | |
| | CCAGTACCAGAAGACGATCCGAGCGG | | | |
| | CGTTTGATTTTCTCGATCGGTCCCAGAT | | | |
| | CAACGAGCCGACGGAGGAAAATTCCT | | | |
| | ATCGAGACGACCGCGTCGGAGGATGG | | | |
| | CCCTTTAGTACCAAGACCCAGGGGTAT | | | |
| | CCAGTCTCCGACTGTACTGCCGAGGCT | | | |
| | CTCAAGGCCATCATCATGGTCCAGAAT | | | |
| | ACGCCTGGATACGAGGATCTGAAGAA | | | |
| | ACAAGTGTCTGACAAGCGGAAACACA | | | |
| | CTGCCATCGATCTACTTTTGGGAATGC | | | |
| | AGAACGTGGGCTCGTTTGAACCGGGCT | | | |
| | CTTTCGCCTCCTATGAGCCTATCCGGG | | | |
| | CGTCGTCCATGCTGGAGAAGATCAATC | | | |
| | CGGCCGAGGTGTTTGGAAACATCATGG | | | |
| | TGGAGTATCCGTACGTGGAATGCACTG | | | |
| | ATTCTGTTGTTCTGGGTCTGTCCTACTT | | | |
| | TCGAAAGTACCACGATTACCGCAACGA | | | |
| | AGACGTGGACCGAGCCATCTCTGCTGC | | | |
| | CATCGGATACATTATTCGAGAGCAGCA | | | |
| | GCCTGACGGTGGCTTCTTTGGCTCCTG | | | |
| | GGGCGTGTGCTACTGCTACGCTCACAT | | | |
| | GTTTGCCATGGAGGCTCTGGTGACGCA | | | |
| | GAATCTCAACTATAACAACTGTTCCAC | | | |
| | GGTTCAAAAGGCGTGCGACTTTCTGGC | | | |
| | GGGCTACCAGGAAGCAGATGGAGGCT | | | |
| | GGGCCGAGGACTTTAAGTCGTGCGAGA | | | |
| | CTCAGATGTACGTGCGCGGACCCCATT | | | |
| | CGCTGGTCGTGCCTACTGCCATGGCCC | | | |
| | TGTTGAGTTTGATGAGTGGTCGGTATC | | | |
| | CCCAGGAGGACAAGATTCATGCTGCGG | | | |
| | CCCGGTTTCTCATGAGCAAGCAGATGA | | | |
| | GCAACGGTGAGTGGCTCAAGGAGGAG | | | |
| | ATGGAGGGGGTGTTTAACCATACTTGT | | | |
| | GCCATTGAGTATCCCAACTACCGGTTA | | | |
| | TATTTTGTCATGAAGGCTTTGGGGTTGT | | | |
| | ATTTCAAGGGATATTGCCAGTGA | | | |
| 950872 | ATGGGAATCCACGAAAGTGTGTCGAA | 73 | MGIHESVSKQFAKNGHSKY | 94 |
| | ACAGTTTGCGAAAAACGGACATTCCAA | | RSDRYGLPKTDLRRWTFHA | |
| | GTACCGCAGCGACCGATACGGCTTACC | | SDLGAQWWKYDDTTPLEE | |
| | TAAGACGGATCTGCGACGATGGACGTT | | LEKRATDYVKYSLELPGYA | |
| | CCACGCGTCCGATCTGGGGGCGCAATG | | PVTLDSKPVKNAYEAALKN | |
| | GTGGAAGTATGACGATACCACACCGCT | | WHLFASLQDPDSGAWQSE | |
| | GGAAGAGCTGGAAAAGAGGGCTACCG | | YDGPQFMSIGYVTACYFGG | |
| | ACTACGTCAAATACTCGCTGGAGCTGC | | NEIPTPVKTEMIRYIVNTAH | |
| | CGGGATACGCGCCCGTGACTCTGGACT | | PVDGGWGLHKEDKSTCFG | |
| | CCAAGCCCGTGAAAAATGCCTACGAA | | TSINYVVLRLLGLSRDHPVC | |
| | GCGGCTCTCAAAAACTGGCATCTGTTT | | VKARKTLLTKFGGAINNPH | |
| | GCGTCGCTGCAAGACCCCGACTCCGGC | | WGKTWLSILNLYKWEGVN | |
| | GCGTGGCAGAGCGAATACGACGGACC | | PAPGELWLLPYFVPVHPGR | |
| | GCAGTTCATGAGCATCGGCTATGTGAC | | WWVHTRWIYLAMGYLEA | |
| | GGCGTGCTACTTTGGCGGCAACGAGAT | | AEAQCELTPLLEELRDEIYK | |
| | CCCCACGCCGGTCAAAACCGAAATGAT | | KPYSEIDFSKHCNSISGVDL | |
| | CAGATACATTGTCAACACAGCCCACCC | | YYPHTGLLKFGNALLRRYR | |
| | AGTTGACGGAGGCTGGGGCCTTCACAA | | KFRPQWIKEKVKEEIYNLC | |
| | AGAAGACAAGAGCACCTGCTTCGGTAC | | LREVSNTRHLCLAPVNNAM | |
| | CAGCATCAACTACGTGGTCCTGCGACT | | SSIVMYLHEGPDPANYKKI | |
| | ACTGGGCCTGTCACGGGATCATCCGGT | | AARWPEFLSLNPSGMFMN | |
| | CTGCGTCAAGGCGCGCAAAACGCTGCT | | GTNGLQVWDTAFAVQYAC | |
| | CACCAAGTTTGGCGGCGCCATCAACAA | | VCGFAELPQYQKTIRAAFD | |
| | CCCCCATTGGGGCAAGACCTGGCTGTC | | FLDRSQINEPMEENSYRDD | |
| | GATTCTCAATCTCTACAAATGGGAGGG | | RVGGWPFSTKTQGYPVSDC | |
| | TGTGAATCCGGCCCCTGGCGAGCTCTG | | TAEALKAIIMVQNTPGYED | |
| | GCTGTTGCCCTACTTTGTTCCTGTTCAT | | LKKQVSDKRKHTAIDLLLG | |
| | CCGGGTCGATGGTGGGTCCATACCCGG | | MQNVGSFEPGSFASYEPIRA | |
| | TGGATCTACCTTGCCATGGGCTATCTG | | SSMLEKINPAEVFGNIMVE | |
| | GAGGCTGCGGAGGCCCAATGCGAACT | | YPYVECTDSVVLGLSYFRK | |
| | CACTCCGTTGCTGGAGGAGCTCCGAGA | | YHDYRNEDVDPAISAAIGYI | |
| | CGAAATCTACAAAAAGCCCTACTCGGA | | IREQQPDGGFFGSWGVCYC | |
| | GATTGATTTCTCCAAACATTGCAACTC | | YAHMFAMEALETQNLNYN | |
| | CATCTCCGGAGTCGACCTCTACTATCC | | NCSTVQKACDFLAGYQEA | |
| | CCACACCGGCCTTTTGAAGTTTGGCAA | | DGGWAEDFKSCETQMYVR | |
| | CGCGCTTCTCCGACGATACCGCAAGTT | | GPHSLVVPTAMALLSLMSG | |
| | CAGACCGCAGTGGATCAAAGAAAAGG | | RYPQEDKIHAAARFLMSKQ | |
| | TCAAGGAGGAAATTTACAACTTGTGCC | | MSNGEWLKEEMEGVFNHT | |
| | TTCGAGAGGTTTCCAACACACGACACT | | CAIEYPNYRFYFVMKALGL | |
| | TGTGTCTCGCTCCCGTCAACAATGCCA | | YFKGYCQ | |
| | TGTCCTCCATTGTCATGTATCTCCATGA | | | |
| | GGGGCCCGATCCGGCGAATTACAAAA | | | |
| | AGATTGCGGCCCGATGGCCCGAATTTC | | | |
| | TGTCTCTGAATCCGTCGGGAATGTTTA | | | |
| | TGAACGGCACCAACGGTCTGCAGGTCT | | | |
| | GGGATACTGCGTTTGCCGTGCAATACG | | | |
| | CGTGTGTTTGTGGCTTTGCCGAACTTCC | | | |
| | CCAGTACCAGAAGACGATCCGAGCGG | | | |
| | CGTTTGATTTTCTCGATCGGTCCCAGAT | | | |
| | CAACGAGCCGATGGAGGAAAATTCCT | | | |
| | ATCGAGACGACCGCGTCGGAGGATGG | | | |
| | CCCTTTAGTACCAAGACCCAGGGGTAT | | | |
| | CCAGTCTCCGACTGTACTGCCGAGGCT | | | |
| | CTCAAGGCCATCATCATGGTCCAGAAT | | | |
| | ACACCTGGATACGAGGATCTGAAGAA | | | |
| | ACAAGTGTCTGACAAGCGGAAACACA | | | |
| | CTGCCATCGATCTACTTTTGGGAATGC | | | |
| | AGAACGTGGGCTCGTTTGAACCGGGCT | | | |
| | CTTTCGCCTCCTATGAGCCTATCCGGG | | | |
| | CGTCGTCCATGCTGGAGAAGATCAATC | | | |
| | CGGCCGAGGTGTTTGGAAACATCATGG | | | |
| | TGGAGTATCCGTACGTGGAATGCACTG | | | |
| | ATTCTGTTGTTCTGGGTCTCTCCTACTT | | | |
| | TCGAAAGTACCACGATTACCGCAACGA | | | |
| | AGACGTGGACCCAGCCATCTCTGCTGC | | | |
| | CATTGGATACATTATTCGAGAGCAGCA | | | |
| | GCCTGACGGCGGCTTCTTTGGCTCCTG | | | |
| | GGGCGTGTGCTACTGCTACGCTCACAT | | | |
| | GTTTGCCATGGAGGCTCTGGAGACGCA | | | |
| | GAATCTCAACTATAACAACTGTTCCAC | | | |
| | GGTTCAAAAGGCGTGCGACTTTCTGGC | | | |
| | GGGCTACCAGGAAGCAGATGGAGGCT | | | |
| | GGGCCGAGGACTTTAAGTCGTGCGAGA | | | |
| | CCCAGATGTACGTGCGCGGACCCCATT | | | |
| | CGCTGGTCGTGCCTACTGCCATGGCCC | | | |
| | TGTTGAGTTTGATGAGTGGTCGGTATC | | | |
| | CCCAGGAGGACAAGATTCATGCTGCGG | | | |
| | CCCGGTTTCTCATGAGCAAGCAGATGA | | | |
| | GCAACGGTGAGTGGCTCAAGGAGGAG | | | |
| | ATGGAGGGGGTGTTTAACCATACTTGT | | | |
| | GCCATTGAGTATCCCAACTACCGGTTT | | | |
| | TATTTTGTCATGAAGGCTTTGGGGTTGT | | | |
| | ATTTCAAGGGATATTGCCAGTGA | | | |
| 950887 | ATGGGAATCCACGAAAGTGTGTCGAA | 74 | MGIHESVSKQFAKNGHSKY | 95 |
| | ACAGTTTGCGAAAAACGGACATTCCAA | | RSDRYGLPKTDLRRWTFHA | |
| | GTACCGCAGCGACCGATACGGCTTACC | | SDLGAQWWKYDGTTPLEE | |
| | TAAGACGGATCTGCGACGATGGACGTT | | LEKRATDYVRYSLELPGYA | |
| | CCACGCGTCCGATCTGGGGGCGCAATG | | PVTLDSKPVKNAYEAALKS | |
| | GTGGAAGTATGACGGTACCACACCGCT | | WHLFASLQDPDSGAWQSE | |
| | GGAAGAGCTGGAAAAGAGGGCTACCG | | YDGPQFMSIGYVTACYFGG | |
| | ACTACGTCAGATACTCGCTGGAGCTGC | | NEIPTPVKTEMIRYIVNTAH | |
| | CGGGATACGCGCCCGTGACTCTGGACT | | PVDGGWGLHKEDKSTCFG | |
| | CCAAGCCCGTGAAAAATGCCTACGAA | | TSINYVVLRLLGLSRDHPVC | |
| | GCGGCTCTCAAAAGCTGGCATCTGTTT | | VKARKTLLTKFGGAINNPH | |
| | GCGTCGCTGCAAGACCCCGACTCCGGC | | WGKTWLSILNLYKWEGVN | |
| | GCATGGCAGTCGGAATACGACGGACC | | PAPGELWLLPYFVPVHPGR | |
| | GCAGTTCATGTCGATCGGTTATGTGAC | | WWVHTRWIYLAMGYLEA | |
| | GGCGTGCTACTTTGGCGGCAACGAGAT | | AEAQCELTPLLEELRDEIYK | |
| | CCCCACGCCGGTCAAAACCGAAATGAT | | KPYSEIDFSKHCNSISGVDL | |
| | CAGATACATTGTCAACACAGCCCACCC | | YYPHTGLLKFGNALLRRYR | |
| | AGTTGACGGAGGCTGGGGCCTTCACAA | | KFRPQWIKEKVKEEIYNLC | |
| | AGAAGACAAGAGCACCTGTTTCGGTAC | | LREVSNTRHLCLAPVNNAM | |
| | CAGCATCAACTACGTGGTCCTGCGACT | | TSIVMYLHEGPDSANYKKI | |
| | ACTGGGCCTGTCACGGGATCATCCGGT | | AARWPEFLSLNPSGMFMN | |
| | CTGCGTCAAGGCGCGCAAAACGCTGCT | | GTNGLQVWDTAFAVQYAC | |
| | CACCAAGTTTGGCGGCGCCATCAACAA | | VCSFAELPQYQKTIRAAFDF | |
| | CCCCCATTGGGGCAAGACCTGGCTGTC | | LDRSQINEPTEENSYRDDRV | |
| | GATTCTCAATCTCTACAAATGGGAGGG | | GGWPFSTKTQGYPVSDCTA | |
| | TGTGAATCCGGCCCCTGGCGAGCTCTG | | EALKAIIMVQNTPGYEDLK | |
| | GCTGTTGCCCTACTTTGTTCCTGTTCAT | | KQVSDKRKHTAIDLLLGMQ | |
| | CCGGGCCGATGGTGGGTCCATACCCGG | | NVGSFEPGSFASYEPIRASS | |
| | TGGATCTACCTTGCCATGGGCTATCTG | | MLEKINPAEVFGNIMVEYP | |
| | GAGGCTGCGGAGGCCCAATGCGAACT | | YVECTDSVVLGLSYFRKYH | |
| | CACTCCGTTGCTGGAGGAGCTCCGAGA | | DYRNEDVDRAISAAIGYIIR | |
| | CGAAATCTACAAAAAGCCCTACTCGGA | | EQQPDGGFFGSWGVCYCY | |
| | GATTGATTTCTCCAAACATTGCAACTC | | AHMFAMEALVTQNLNYNN | |
| | CATCTCCGGAGTCGACCTCTACTATCC | | CSTVQKACDFLAGYQEAD | |
| | CCACACCGGCCTTTTGAAGTTTGGCAA | | GGWAEDFKSCETQMYVRG | |
| | CGCGCTTCTCCGACGATACCGCAAGTT | | PHSLVVPTAMALLSLMSGR | |
| | CAGACCGCAGTGGATCAAAGAAAAGG | | YPQEDKIHAAARFLMSKQ | |
| | TCAAGGAGGAAATTTACAACTTGTGCC | | MSNGEWLKEEMEGVFNHT | |
| | TTCGAGAGGTTTCCAACACACGACACT | | CAIEYPNYRFYFVMKALGL | |
| | TGTGTCTCGCTCCCGTCAACAATGCCA | | YFKGYCQ | |
| | TGACCTCCATTGTCATGTATCTCCATGA | | | |
| | GGGGCCCGATTCGGCGAATTACAAAA | | | |
| | AGATTGCGGCCCGATGGCCCGAATTTC | | | |
| | TGTCTCTGAATCCGTCGGGAATGTTTA | | | |
| | TGAACGGCACCAACGGTCTGCAGGTCT | | | |
| | GGGATACTGCGTTTGCCGTGCAATACG | | | |
| | CGTGTGTTTGTAGCTTTGCCGAACTTCC | | | |
| | CCAGTACCAGAAGACGATCCGAGCGG | | | |
| | CGTTTGATTTTCTCGATCGGTCCCAGAT | | | |
| | CAACGAGCCGACGGAGGAAAATTCCT | | | |
| | ATCGAGACGACCGCGTCGGAGGATGG | | | |
| | CCCTTTAGTACCAAGACCCAGGGGTAT | | | |
| | CCAGTCTCCGACTGTACTGCCGAGGCT | | | |
| | CTCAAGGCCATCATCATGGTCCAGAAT | | | |
| | ACGCCTGGATACGAGGATCTGAAGAA | | | |
| | ACAAGTGTCTGACAAGCGGAAACACA | | | |
| | CTGCCATCGATCTACTTTTGGGAATGC | | | |
| | AGAACGTGGGCTCGTTTGAACCGGGCT | | | |
| | CTTTCGCCTCCTATGAGCCTATCCGGG | | | |
| | CGTCGTCCATGCTGGAGAAGATCAATC | | | |
| | CGGCCGAGGTGTTTGGAAACATCATGG | | | |
| | TGGAGTATCCGTACGTGGAATGCACTG | | | |
| | ATTCTGTTGTTCTGGGTCTGTCCTACTT | | | |
| | TCGAAAGTACCACGATTACCGCAACGA | | | |
| | AGACGTGGACCGAGCCATCTCTGCTGC | | | |
| | CATCGGATACATTATTCGAGAGCAGCA | | | |
| | GCCTGACGGTGGCTTCTTTGGCTCCTG | | | |
| | GGGCGTGTGCTACTGCTACGCTCACAT | | | |
| | GTTTGCCATGGAGGCTCTGGTGACGCA | | | |
| | GAATCTCAACTATAACAACTGTTCCAC | | | |
| | GGTTCAAAAGGCGTGCGACTTTCTGGC | | | |
| | GGGCTACCAGGAAGCAGATGGAGGCT | | | |
| | GGGCCGAGGACTTTAAGTCGTGCGAGA | | | |
| | CTCAGATGTACGTGCGCGGACCCCATT | | | |
| | CGCTGGTCGTGCCTACTGCCATGGCCC | | | |
| | TGTTGAGTTTGATGAGTGGTCGGTATC | | | |
| | CCCAGGAGGACAAGATTCATGCTGCGG | | | |
| | CCCGGTTTCTCATGAGCAAGCAGATGA | | | |
| | GCAACGGTGAGTGGCTCAAGGAGGAG | | | |
| | ATGGAGGGGGTGTTTAACCATACTTGT | | | |
| | GCCATTGAGTATCCCAACTACCGGTTT | | | |
| | TATTTTGTCATGAAGGCTTTGGGGTTGT | | | |
| | ATTTCAAGGGATATTGCCAGTGA | | | |
| 950888 | ATGGGAATCCACGAAAGTGTGTCGAA | 71 | MGIHESVSKQFAKNGHSKY | 92 |
| | ACAGTTTGCGAAAAACGGACATTCCAA | | RSDRYGLPKTDLRRWTFHA | |
| | GTACCGCAGCGACCGATACGGCTTACC | | SDLGAQWWKYDDTTPLEE | |
| | TAAGACGGATCTGCGACGATGGACGTT | | LEKRATDYVKYSLELPGYA | |
| | CCACGCGTCCGATCTGGGGGCGCAATG | | PVTLGSKLVKNAYEAALKN | |
| | GTGGAAGTATGACGATACCACACCGCT | | WHLFASLQDPDSGAWQSE | |
| | GGAAGAGCTGGAAAAGAGGGCTACCG | | YDGPQFMSIGYVTACYFGG | |
| | ACTACGTCAAATACTCGCTGGAGCTGC | | NEIPTPVKTEMIRYIVNTAH | |
| | CGGGATACGCGCCCGTGACTCTGGGCT | | PVDGGWGLHKEDKSTCFG | |
| | CCAAGCTCGTGAAAAATGCCTACGAAG | | ASINYVVLRLLGLSRDHPV | |
| | CGGCTCTCAAAAACTGGCATCTGTTTG | | CVKARKTLLIKFGGAINNP | |
| | CGTCGCTGCAAGACCCCGACTCCGGCG | | HWGKTWLSILNLYKWEGV | |
| | CATGGCAGTCGGAATACGACGGACCG | | NPTPGELWLLPYFVPVHPG | |
| | CAGTTCATGTCGATCGGTTATGTGACG | | RWWVHTRWIYLAMGYLE | |
| | GCGTGCTACTTTGGCGGCAACGAGATC | | AAEAQCELTPLLEELRDEIY | |
| | CCCACGCCGGTCAAAACCGAAATGATC | | KKPYSEIDFSKHCNSISGVD | |
| | AGATACATTGTCAACACAGCCCACCCA | | LYYPHTGLLKFGNALLRRY | |
| | GTTGACGGAGGCTGGGGCCTTCACAAA | | RKFRPQWIKEKVKEEIYNL | |
| | GAAGACAAGAGCACCTGTTTCGGTGCC | | CLREVSNTRHLCLAPVNNA | |
| | AGCATCAACTACGTGGTCCTGCGACTA | | MTSIVMYLHEGPDSANYKK | |
| | CTGGGCCTGTCACGGGATCATCCGGTC | | IAARWPEFLSLNPSGMFMN | |
| | TGCGTCAAGGCGCGCAAAACGCTGCTC | | GTNGLQVWDTAFAVQYAC | |
| | ATCAAGTTTGGCGGCGCCATCAACAAC | | VCGFAELPQYQKTIRAAFD | |
| | CCCCATTGGGGCAAGACCTGGCTGTCG | | FLDRSQINEPTEENSYRDDR | |
| | ATTCTCAATCTCTACAAATGGGAGGGT | | VGGWPFSTKTQGYPVSDCT | |
| | GTGAATCCGACCCCTGGCGAGCTCTGG | | AEALKAIIMVQNTPGYEDL | |
| | CTGTTGCCCTACTTTGTTCCTGTTCATC | | KKQVSDKRKHTAIDLLLGM | |
| | CGGGCCGATGGTGGGTCCATACCCGGT | | QNVGSFEPGSFASYEPIRAS | |
| | GGATCTACCTTGCCATGGGCTATCTGG | | SMLEKINPAEVFGNIMVEY | |
| | AGGCTGCGGAGGCCCAATGCGAACTC | | PYVECTDSVVLGLSYFRKY | |
| | ACTCCGTTGCTGGAGGAGCTCCGAGAC | | HDYRNEDVDRAISAAIGYII | |
| | GAAATCTACAAAAAGCCCTACTCGGAG | | REQQPDGGFFGSWGVCYC | |
| | ATTGATTTCTCCAAACATTGCAACTCC | | YAHMFAMEALETQNLNYN | |
| | ATCTCCGGAGTCGACCTCTACTATCCC | | NCSTVQKACDFLAGYQEA | |
| | CACACCGGCCTTTTGAAGTTTGGCAAC | | DGGWAEDFKSCETQMYVR | |
| | GCGCTTCTCCGACGATACCGCAAGTTC | | GPHSLVVPTAMALLSLMSG | |
| | AGACCGCAGTGGATCAAAGAAAAGGT | | RYPQEDKIHAAARFLMSKQ | |
| | CAAGGAGGAAATTTACAACTTGTGCCT | | MSNGEWLKEEMEGVFNHT | |
| | TCGAGAGGTTTCCAACACACGACACTT | | CAIEYPNYRFYFVMKALGL | |
| | GTGTCTCGCTCCCGTCAACAATGCCAT | | YFKGYCQ | |
| | GACCTCCATTGTCATGTATCTCCATGA | | | |
| | GGGGCCCGATTCGGCGAATTACAAAA | | | |
| | AGATTGCGGCCCGATGGCCCGAATTTC | | | |
| | TGTCTCTGAATCCGTCGGGAATGTTTA | | | |
| | TGAACGGCACCAACGGTCTGCAGGTCT | | | |
| | GGGATACTGCGTTTGCCGTGCAATACG | | | |
| | CGTGTGTTTGTGGCTTTGCCGAACTTCC | | | |
| | CCAGTACCAGAAGACGATCCGAGCGG | | | |
| | CGTTTGATTTTCTCGATCGGTCCCAGAT | | | |
| | CAACGAGCCGACGGAGGAAAATTCCT | | | |
| | ATCGAGACGACCGCGTCGGAGGATGG | | | |
| | CCCTTTAGTACCAAGACCCAGGGGTAT | | | |
| | CCAGTCTCCGACTGTACTGCCGAGGCT | | | |
| | CTCAAGGCCATCATCATGGTCCAGAAT | | | |
| | ACGCCTGGATACGAGGATCTGAAGAA | | | |
| | ACAAGTGTCTGACAAGCGGAAACACA | | | |
| | CTGCCATCGATCTACTTTTGGGAATGC | | | |
| | AGAACGTGGGCTCGTTTGAACCGGGCT | | | |
| | CTTTCGCCTCCTATGAGCCTATCCGGG | | | |
| | CGTCGTCCATGCTGGAGAAGATCAATC | | | |
| | CGGCCGAGGTGTTTGGAAACATCATGG | | | |
| | TGGAGTATCCGTACGTGGAATGCACTG | | | |
| | ATTCTGTTGTTCTGGGTCTGTCCTACTT | | | |
| | TCGAAAGTACCACGATTACCGCAACGA | | | |
| | AGACGTGGACCGAGCCATCTCTGCTGC | | | |
| | CATTGGATACATTATTCGAGAGCAGCA | | | |
| | GCCTGACGGCGGCTTCTTTGGCTCCTG | | | |
| | GGGCGTGTGCTACTGCTACGCTCACAT | | | |
| | GTTTGCCATGGAGGCTCTGGAGACGCA | | | |
| | GAATCTCAACTATAACAACTGTTCCAC | | | |
| | GGTTCAAAAGGCGTGCGACTTTCTGGC | | | |
| | GGGCTACCAGGAAGCAGATGGAGGCT | | | |
| | GGGCCGAGGACTTTAAGTCGTGCGAGA | | | |
| | CTCAGATGTACGTGCGCGGACCCCATT | | | |
| | CGCTGGTCGTGCCTACTGCCATGGCCC | | | |
| | TGTTGAGTTTGATGAGTGGTCGGTATC | | | |
| | CCCAGGAGGACAAGATTCATGCTGCGG | | | |
| | CCCGGTTTCTCATGAGCAAGCAGATGA | | | |
| | GCAACGGTGAGTGGCTCAAGGAGGAG | | | |
| | ATGGAGGGGGTGTTTAACCATACTTGT | | | |
| | GCCATTGAGTATCCCAACTACCGGTTT | | | |
| | TATTTTGTCATGAAGGCTTTGGGGTTGT | | | |
| | ATTTCAAGGGATATTGCCAGTGA | | | |
| 950910 | ATGGGAATCCACGAAAGTGTGTCGAA | 63 | MGIHESVSKQFAKNGHSKY | 84 |
| | ACAGTTTGCGAAAAACGGACATTCCAA | | RSDRYGLPKTDLRRWTFHA | |
| | GTACCGCAGCGACCGATACGGCTTACC | | SDLGAQWWKYDDTTPLEE | |
| | TAAGACGGATCTGCGACGATGGACGTT | | LEKRATDYVKYSLELPGYA | |
| | CCACGCGTCCGATCTGGGGGCGCAATG | | PVTLDSKPVKNAYEAALKN | |
| | GTGGAAGTATGACGATACCACACCGCT | | WHLFASLQDPDSGAWQSE | |
| | GGAAGAGCTGGAAAAGAGGGCTACCG | | YDGPQFMSIGYVTACYFGG | |
| | ACTACGTCAAATACTCGCTGGAGCTGC | | NEIPTPVKTEMIRYIVNTAH | |
| | CGGGATACGCGCCCGTGACTCTGGACT | | PVDGGWGLHKEDKSTCFG | |
| | CCAAGCCCGTGAAAAATGCCTACGAA | | TSNNYVVLRLLGLSRDHPV | |
| | GCGGCTCTCAAAAACTGGCATCTGTTT | | CVKARKTLLTKFGGAINNP | |
| | GCGTCGCTGCAAGACCCCGACTCCGGC | | HWGKTWLSILNLYKWEGV | |
| | GCATGGCAGTCGGAATACGACGGACC | | NPAPGELWLLPYFVPVHPG | |
| | GCAGTTCATGTCGATCGGTTATGTGAC | | RWWVHTRWIYLAMGYLE | |
| | GGCGTGCTACTTTGGCGGCAACGAGAT | | AAEAQCELTPLLEELRDEIY | |
| | CCCCACGCCGGTCAAAACCGAAATGAT | | KKPYSEIDFSKHCNSISGVD | |
| | CAGATACATTGTCAACACAGCCCACCC | | LYYPHTGLLKFGNALLRRY | |
| | AGTTGACGGAGGCTGGGGCCTTCACAA | | RKFRPQWIKEKVKEEIYNL | |
| | AGAAGACAAGAGCACCTGTTTCGGTAC | | CLREVSNTRHLCLAPVNNA | |
| | CAGCAACAACTACGTGGTCCTGCGACT | | MTSIVMYLHEGPDSANYKK | |
| | ACTGGGCCTGTCACGGGATCATCCGGT | | IAARWPEFLSLNPSGMFMN | |
| | CTGCGTCAAGGCGCGCAAAACGCTGCT | | GTNGLQVWDTAFAVQYAS | |
| | CACCAAGTTTGGCGGCGCCATCAACAA | | VCGFAELPQYQKTIRAAFD | |
| | CCCCCATTGGGGCAAGACCTGGCTGTC | | FLDRSQINEPTEENSYRDDR | |
| | GATTCTCAATCTCTACAAATGGGAGGG | | VGGWPFSTKTQGYPVSDCT | |
| | TGTGAATCCGGCCCCTGGCGAGCTCTG | | AEALKAIIMVQNTPGYEDL | |
| | GCTGTTGCCCTACTTTGTTCCTGTTCAT | | KKQVSDKRKHTAIDLLLGM | |
| | CCGGGCCGATGGTGGGTCCATACCCGG | | QNVGSFEPGSFASYEPIRAS | |
| | TGGATCTACCTTGCCATGGGCTATCTG | | SMLEKINPAEVFGNIMVEY | |
| | GAGGCTGCGGAGGCCCAATGCGAACT | | PYVECTDSVVMGLSYFRKY | |
| | CACTCCGTTGCTGGAGGAGCTCCGAGA | | HDYRNEDVDRAISAAIGYII | |
| | CGAAATCTACAAAAAGCCCTACTCGGA | | REQQPDGGFFGSWGVCYC | |
| | GATTGATTTCTCCAAACATTGCAACTC | | YAHMFAMEALETQNLNYN | |
| | CATCTCCGGAGTCGACCTCTACTATCC | | NCSTVQKACDFLAGYQEA | |
| | CCACACCGGCCTTTTGAAGTTTGGCAA | | DGGWAEDFKSCETQMYVR | |
| | CGCGCTTCTCCGACGATACCGCAAGTT | | GPHSLVVPTAMALLSLMSS | |
| | CAGACCGCAGTGGATCAAAGAAAAGG | | RYPQEDKIHAAARFLMSKQ | |
| | TCAAGGAGGAAATTTACAACTTGTGCC | | MSNGEWLKEEMEGVFNHT | |
| | TTCGAGAGGTTTCCAACACACGACACT | | CAIEYPNYRFYFVMKALGL | |
| | TGTGTCTCGCTCCCGTCAACAATGCCA | | YFKGYCQ | |
| | TGACCTCCATTGTCATGTATCTCCATGA | | | |
| | GGGGCCCGATTCGGCGAATTACAAAA | | | |
| | AGATTGCGGCCCGATGGCCCGAATTTC | | | |
| | TGTCTCTGAATCCGTCGGGAATGTTTA | | | |
| | TGAACGGCACCAACGGTCTGCAGGTCT | | | |
| | GGGATACTGCGTTTGCCGTGCAATACG | | | |
| | CGAGTGTTTGTGGCTTTGCCGAACTTC | | | |
| | CCCAGTACCAGAAGACGATCCGAGCG | | | |
| | GCGTTTGATTTTCTCGATCGGTCCCAG | | | |
| | ATCAACGAGCCGACGGAGGAAAATTC | | | |
| | CTATCGAGACGACCGCGTCGGAGGATG | | | |
| | GCCCTTTAGTACCAAGACCCAGGGGTA | | | |
| | TCCAGTCTCCGACTGTACTGCCGAGGC | | | |
| | TCTCAAGGCCATCATCATGGTCCAGAA | | | |
| | TACGCCTGGATACGAGGATCTGAAGAA | | | |
| | ACAAGTGTCTGACAAGCGGAAACACA | | | |
| | CTGCCATCGATCTACTTTTGGGAATGC | | | |
| | AGAACGTGGGCTCGTTTGAACCGGGCT | | | |
| | CTTTCGCCTCCTATGAGCCTATCCGGG | | | |
| | CGTCGTCCATGCTGGAGAAGATCAATC | | | |
| | CGGCCGAGGTGTTTGGAAACATCATGG | | | |
| | TGGAGTATCCGTACGTGGAATGCACTG | | | |
| | ATTCTGTTGTTATGGGTCTGTCCTACTT | | | |
| | TCGAAAGTACCACGATTACCGCAACGA | | | |
| | AGACGTGGACCGAGCCATCTCTGCTGC | | | |
| | CATTGGATACATTATTCGAGAGCAGCA | | | |
| | GCCTGACGGCGGCTTCTTTGGCTCCTG | | | |
| | GGGCGTGTGCTACTGCTACGCTCACAT | | | |
| | GTTTGCCATGGAGGCTCTGGAGACGCA | | | |
| | GAATCTCAACTATAACAACTGTTCCAC | | | |
| | GGTTCAAAAGGCGTGCGACTTTCTGGC | | | |
| | GGGCTACCAGGAAGCAGATGGAGGCT | | | |
| | GGGCCGAGGACTTTAAGTCGTGCGAGA | | | |
| | CTCAGATGTACGTGCGCGGACCCCATT | | | |
| | CGCTGGTCGTGCCTACTGCCATGGCCC | | | |
| | TGTTGAGTTTGATGAGTAGTCGGTATC | | | |
| | CCCAGGAGGACAAGATTCATGCTGCGG | | | |
| | CCCGGTTTCTCATGAGCAAGCAGATGA | | | |
| | GCAACGGTGAGTGGCTCAAGGAGGAG | | | |
| | ATGGAGGGGGTGTTTAACCATACTTGT | | | |
| | GCCATTGAGTATCCCAACTACCGGTTT | | | |
| | TATTTTGTCATGAAGGCTTTGGGGTTGT | | | |
| | ATTTCAAGGGATATTGCCAGTGA | | | |
| 950917 | ATGGGAATCCACGAAAGTGTGTCGAA | 74 | MGIHESVSKQFAKNGHSKY | 95 |
| | ACAGTTTGCGAAAAACGGACATTCCAA | | RSDRYGLPKTDLRRWTFHA | |
| | GTACCGCAGCGACCGATACGGCTTACC | | SDLGAQWWKYDGTTPLEE | |
| | TAAGACGGATCTGCGACGATGGACGTT | | LEKRATDYVRYSLELPGYA | |
| | CCACGCGTCCGATCTGGGGGCGCAATG | | PVTLDSKPVKNAYEAALKS | |
| | GTGGAAGTATGACGGTACCACACCGCT | | WHLFASLQDPDSGAWQSE | |
| | GGAAGAGCTGGAAAAGAGGGCTACCG | | YDGPQFMSIGYVTACYFGG | |
| | ACTACGTCAGATACTCGCTGGAGCTGC | | NEIPTPVKTEMIRYIVNTAH | |
| | CGGGATACGCGCCCGTGACTCTGGACT | | PVDGGWGLHKEDKSTCFG | |
| | CCAAGCCCGTGAAAAATGCCTACGAA | | TSINYVVLRLLGLSRDHPVC | |
| | GCGGCTCTCAAAAGCTGGCATCTGTTT | | VKARKTLLTKFGGAINNPH | |
| | GCGTCGCTGCAAGACCCCGACTCCGGC | | WGKTWLSILNLYKWEGVN | |
| | GCATGGCAGTCGGAATACGACGGACC | | PAPGELWLLPYFVPVHPGR | |
| | GCAGTTCATGTCGATCGGTTATGTGAC | | WWVHTRWIYLAMGYLEA | |
| | GGCGTGCTACTTTGGCGGCAACGAGAT | | AEAQCELTPLLEELRDEIYK | |
| | CCCCACGCCGGTCAAAACCGAAATGAT | | KPYSEIDFSKHCNSISGVDL | |
| | CAGATACATTGTCAACACAGCCCACCC | | YYPHTGLLKFGNALLRRYR | |
| | AGTTGACGGAGGCTGGGGCCTTCACAA | | KFRPQWIKEKVKEEIYNLC | |
| | AGAAGACAAGAGCACCTGTTTCGGTAC | | LREVSNTRHLCLAPVNNAM | |
| | CAGCATCAACTACGTGGTCCTGCGACT | | TSIVMYLHEGPDSANYKKI | |
| | ACTGGGCCTGTCACGGGATCATCCGGT | | AARWPEFLSLNPSGMFMN | |
| | CTGCGTCAAGGCGCGCAAAACGCTGCT | | GTNGLQVWDTAFAVQYAC | |
| | CACCAAGTTTGGCGGCGCCATCAACAA | | VCSFAELPQYQKTIRAAFDF | |
| | CCCCCATTGGGGCAAGACCTGGCTGTC | | LDRSQINEPTEENSYRDDRV | |
| | GATTCTCAATCTCTACAAATGGGAGGG | | GGWPFSTKTQGYPVSDCTA | |
| | TGTGAATCCGGCCCCTGGCGAGCTCTG | | EALKAIIMVQNTPGYEDLK | |
| | GCTGTTGCCCTACTTTGTTCCTGTTCAT | | KQVSDKRKHTAIDLLLGMQ | |
| | CCGGGCCGATGGTGGGTCCATACCCGG | | NVGSFEPGSFASYEPIRASS | |
| | TGGATCTACCTTGCCATGGGCTATCTG | | MLEKINPAEVFGNIMVEYP | |
| | GAGGCTGCGGAGGCCCAATGCGAACT | | YVECTDSVVLGLSYFRKYH | |
| | CACTCCGTTGCTGGAGGAGCTCCGAGA | | DYRNEDVDRAISAAIGYIIR | |
| | CGAAATCTACAAAAAGCCCTACTCGGA | | EQQPDGGFFGSWGVCYCY | |
| | GATTGATTTCTCCAAACATTGCAACTC | | AHMFAMEALVTQNLNYNN | |
| | CATCTCCGGAGTCGACCTCTACTATCC | | CSTVQKACDFLAGYQEAD | |
| | CCACACCGGCCTTTTGAAGTTTGGCAA | | GGWAEDFKSCETQMYVRG | |
| | CGCGCTTCTCCGACGATACCGCAAGTT | | PHSLVVPTAMALLSLMSGR | |
| | CAGACCGCAGTGGATCAAAGAAAAGG | | YPQEDKIHAAARFLMSKQ | |
| | TCAAGGAGGAAATTTACAACTTGTGCC | | MSNGEWLKEEMEGVFNHT | |
| | TTCGAGAGGTTTCCAACACACGACACT | | CAIEYPNYRFYFVMKALGL | |
| | TGTGTCTCGCTCCCGTCAACAATGCCA | | YFKGYCQ | |
| | TGACCTCCATTGTCATGTATCTCCATGA | | | |
| | GGGGCCCGATTCGGCGAATTACAAAA | | | |
| | AGATTGCGGCCCGATGGCCCGAATTTC | | | |
| | TGTCTCTGAATCCGTCGGGAATGTTTA | | | |
| | TGAACGGCACCAACGGTCTGCAGGTCT | | | |
| | GGGATACTGCGTTTGCCGTGCAATACG | | | |
| | CGTGTGTTTGTAGCTTTGCCGAACTTCC | | | |
| | CCAGTACCAGAAGACGATCCGAGCGG | | | |
| | CGTTTGATTTTCTCGATCGGTCCCAGAT | | | |
| | CAACGAGCCGACGGAGGAAAATTCCT | | | |
| | ATCGAGACGACCGCGTCGGAGGATGG | | | |
| | CCCTTTAGTACCAAGACCCAGGGGTAT | | | |
| | CCAGTCTCCGACTGTACTGCCGAGGCT | | | |
| | CTCAAGGCCATCATCATGGTCCAGAAT | | | |
| | ACGCCTGGATACGAGGATCTGAAGAA | | | |
| | ACAAGTGTCTGACAAGCGGAAACACA | | | |
| | CTGCCATCGATCTACTTTTGGGAATGC | | | |
| | AGAACGTGGGCTCGTTTGAACCGGGCT | | | |
| | CTTTCGCCTCCTATGAGCCTATCCGGG | | | |
| | CGTCGTCCATGCTGGAGAAGATCAATC | | | |
| | CGGCCGAGGTGTTTGGAAACATCATGG | | | |
| | TGGAGTATCCGTACGTGGAATGCACTG | | | |
| | ATTCTGTTGTTCTGGGTCTGTCCTACTT | | | |
| | TCGAAAGTACCACGATTACCGCAACGA | | | |
| | AGACGTGGACCGAGCCATCTCTGCTGC | | | |
| | CATCGGATACATTATTCGAGAGCAGCA | | | |
| | GCCTGACGGTGGCTTCTTTGGCTCCTG | | | |
| | GGGCGTGTGCTACTGCTACGCTCACAT | | | |
| | GTTTGCCATGGAGGCTCTGGTGACGCA | | | |
| | GAATCTCAACTATAACAACTGTTCCAC | | | |
| | GGTTCAAAAGGCGTGCGACTTTCTGGC | | | |
| | GGGCTACCAGGAAGCAGATGGAGGCT | | | |
| | GGGCCGAGGACTTTAAGTCGTGCGAGA | | | |
| | CTCAGATGTACGTGCGCGGACCCCATT | | | |
| | CGCTGGTCGTGCCTACTGCCATGGCCC | | | |
| | TGTTGAGTTTGATGAGTGGTCGGTATC | | | |
| | CCCAGGAGGACAAGATTCATGCTGCGG | | | |
| | CCCGGTTTCTCATGAGCAAGCAGATGA | | | |
| | GCAACGGTGAGTGGCTCAAGGAGGAG | | | |
| | ATGGAGGGGGTGTTTAACCATACTTGT | | | |
| | GCCATTGAGTATCCCAACTACCGGTTT | | | |
| | TATTTTGTCATGAAGGCTTTGGGGTTGT | | | |
| | ATTTCAAGGGATATTGCCAGTGA | | | |
| 959829 | ATGGGAATCCACGAAAGTGTGTCGAA | 78 | MGIHESVSKQFAKNGHSKY | 99 |
| | ACAGTTTGCGAAAAACGGACATTCCAA | | RSDRYGLPKTDLRRWTFHA | |
| | GTACCGCAGCGACCGATACGGCTTACC | | SDLGAQWWKYDDTTPLEE | |
| | TAAGACGGATCTGCGACGATGGACGTT | | LEKRATDYVKYSLELPGYA | |
| | CCACGCGTCCGATCTGGGGGCGCAATG | | PVTLDSKPVKNAYEAALKN | |
| | GTGGAAGTATGACGATACCACACCGCT | | WHLFASLQDPDSGAWQSE | |
| | GGAAGAGCTGGAAAAGAGGGCTACCG | | YDGPQFMSIGYVTACYFGG | |
| | ACTACGTCAAATACTCGCTGGAGCTGC | | NEIPTPVKTEMIRYIVNTAH | |
| | CGGGATACGCGCCCGTGACTCTGGACT | | PVDGGWGLHKEDKSTCFG | |
| | CCAAGCCCGTGAAAAATGCCTACGAA | | TSINYVVLRLLGLSRDHPVC | |
| | GCGGCTCTCAAAAACTGGCATCTGTTT | | VKARKTLLTKFGGAINNPH | |
| | GCGTCGCTGCAAGACCCCGACTCCGGC | | WGKTWLSILNLYKWEGVN | |
| | GCATGGCAGTCGGAATACGACGGACC | | PAPGELWLLPYFVPVHPGR | |
| | GCAGTTCATGTCGATCGGTTATGTGAC | | WWVHTRWIYLAMGYLEA | |
| | GGCGTGCTACTTTGGCGGCAACGAGAT | | AEAQCELTPLLEELRDEIYK | |
| | CCCCACGCCGGTCAAAACCGAAATGAT | | KPYSEIDFSKHCNSISGVDL | |
| | CAGATACATTGTCAACACAGCCCACCC | | YYPHTGFLKFGNALLRRYR | |
| | AGTTGACGGAGGCTGGGGCCTTCACAA | | KFRPQWIKEKVKEEIYNLC | |
| | AGAAGACAAGAGCACCTGTTTCGGTAC | | LREASNTRHLCLAPVNNAM | |
| | CAGCATCAACTACGTGGTCCTGCGACT | | TSIVMYLHEGPDSANYKKI | |
| | ACTGGGCCTGTCACGGGATCATCCGGT | | AARWPEFLSLNPSGMFMN | |
| | CTGCGTCAAGGCGCGCAAAACGCTGCT | | GINGLQVWDTAFAVQYAC | |
| | CACCAAGTTTGGCGGCGCCATCAACAA | | VCGFAELPQYQKTIRAAFD | |
| | CCCCCATTGGGGCAAGACCTGGCTGTC | | FLDRSQINEPTEENSYRDDR | |
| | GATTCTCAATCTCTACAAATGGGAGGG | | VGGWPFSTKTQGYPVSDCT | |
| | TGTGAATCCGGCCCCTGGCGAGCTCTG | | AEALKAIIMVQNTPGYEDL | |
| | GCTGTTGCCCTACTTTGTTCCTGTTCAT | | KKQVSDKRKHTAIDLLLGM | |
| | CCGGGCCGATGGTGGGTCCATACCCGG | | QNVGSFEPGSFASYEPIRAS | |
| | TGGATCTACCTTGCCATGGGCTATCTG | | SMLEKINPAEVFGNIMVEY | |
| | GAGGCTGCGGAGGCCCAATGCGAACT | | PYVECTDSVVLGLSYFRKY | |
| | CACTCCGTTGCTGGAGGAGCTCCGAGA | | HDYRNEDVDRAISAAIGYII | |
| | TGAAATCTACAAAAAGCCCTACTCGGA | | REQQPDGGFFGSWGVCYC | |
| | GATTGATTTCTCCAAACATTGCAACTC | | YAHMFAMEALETQNLNYN | |
| | CATCTCCGGAGTCGACCTCTACTACCC | | NCSTVQKACDFLAGYQEA | |
| | CCACACCGGCTTTTTGAAGTTTGGCAA | | DGGWAEDFKSCETQMYVR | |
| | CGCGCTTCTCCGACGATACCGCAAGTT | | GPHSLVVPTAMALLSLMSG | |
| | CAGACCGCAGTGGATCAAAGAAAAGG | | RYPQEDEIHAAARFLMSKQ | |
| | TCAAGGAGGAAATTTACAACTTGTGCC | | MSNGEWLKEEMEGVFNHT | |
| | TTCGAGAGGCTTCCAACACACGACACT | | CAIEYPNYRFYFVMKALGL | |
| | TGTGTCTCGCTCCCGTCAACAATGCCA | | YFKGYCQ | |
| | TGACCTCCATTGTCATGTATCTCCATGA | | | |
| | GGGGCCCGATTCGGCGAATTACAAAA | | | |
| | AGATTGCGGCCCGATGGCCCGAATTTC | | | |
| | TGTCTCTGAATCCGTCGGGAATGTTTA | | | |
| | TGAACGGCATCAACGGTCTGCAGGTCT | | | |
| | GGGATACTGCGTTTGCCGTGCAATACG | | | |
| | CGTGTGTTTGTGGCTTTGCCGAACTTCC | | | |
| | CCAGTACCAGAAGACGATCCGAGCGG | | | |
| | CGTTTGATTTTCTCGATCGGTCCCAGAT | | | |
| | CAACGAGCCGACGGAGGAAAATTCCT | | | |
| | ATCGAGACGACCGCGTCGGAGGATGG | | | |
| | CCCTTTAGTACCAAGACCCAGGGGTAT | | | |
| | CCAGTCTCCGACTGTACTGCCGAGGCT | | | |
| | CTCAAGGCCATCATCATGGTCCAGAAT | | | |
| | ACGCCTGGATACGAGGATCTGAAGAA | | | |
| | ACAAGTATCTGACAAGCGGAAACACA | | | |
| | CTGCCATCGATCTACTTTTGGGAATGC | | | |
| | AGAACGTGGGCTCGTTTGAACCGGGCT | | | |
| | CTTTCGCCTCCTATGAGCCTATCCGGG | | | |
| | CGTCGTCCATGCTGGAGAAGATCAATC | | | |
| | CGGCCGAGGTGTTTGGAAACATCATGG | | | |
| | TGGAGTATCCGTACGTGGAATGCACTG | | | |
| | ATTCTGTTGTTCTGGGTCTGTCCTACTT | | | |
| | TCGAAAGTACCACGATTACCGTAACGA | | | |
| | AGACGTGGACCGAGCCATCTCTGCTGC | | | |
| | CATTGGATACATTATTCGAGAGCAGCA | | | |
| | GCCTGACGGCGGCTTCTTTGGCTCCTG | | | |
| | GGGCGTGTGCTACTGCTACGCTCACAT | | | |
| | GTTTGCCATGGAGGCTCTGGAGACGCA | | | |
| | GAATCTCAACTATAACAACTGTTCCAC | | | |
| | GGTTCAAAAGGCGTGCGACTTTCTGGC | | | |
| | AGGTTACCAGGAAGCAGATGGAGGCT | | | |
| | GGGCCGAGGACTTTAAGTCGTGCGAGA | | | |
| | CTCAGATGTACGTGCGCGGACCCCATT | | | |
| | CGCTGGTCGTGCCTACTGCCATGGCCC | | | |
| | TGTTGAGTTTGATGAGTGGTCGGTATC | | | |
| | CCCAGGAGGACGAGATTCATGCTGCGG | | | |
| | CCCGGTTTCTCATGAGCAAGCAGATGA | | | |
| | GCAACGGTGAGTGGCTCAAGGAGGAG | | | |
| | ATGGAGGGGGTGTTTAACCATACTTGT | | | |
| | GCCATTGAGTATCCCAACTACCGGTTT | | | |
| | TATTTTGTCATGAAGGCTTTGGGGTTGT | | | |
| | ATTTCAAGGGATATTGCCAGTGA | | | |
| Parent | ATGACAGAATTTTATTCTGACACAATC | 79 | MTEFYSDTIGLPKTDPRLW | 313 |
| strain | GGTCTACCAAAGACAGATCCACGTCTT | | RLRTDELGRESWEYLTPQQ | |
| from | TGGAGACTGAGAACTGATGAGCTAGG | | AANDPPSTFTQWLLQDPKF | |
| Example | CCGAGAAAGCTGGGAATATTTAACCCC | | PQPHPERNKHSPDFSAFDA | |
| 4 | TCAGCAAGCCGCAAACGACCCACCATC | | CHNGASFFKLLQEPDSGIFP | |
| | CACTTTCACGCAGTGGCTTCTTCAAGA | | CQYKGPMFMTIGYVAVNYI | |
| | TCCCAAATTTCCTCAACCTCATCCAGA | | AGIEIPEHERIELIRYIVNTA | |
| | AAGAAATAAGCATTCACCAGATTTTTC | | HPVDGGWGLHSVDKSTVF | |
| | AGCCTTCGATGCGTGTCATAATGGTGC | | GTVLNYVILRLLGLPKDHP | |
| | ATCTTTTTTCAAACTGCTTCAAGAGCCT | | VCAKARSTLLRLGGAIGSP | |
| | GACTCAGGTATTTTTCCGTGTCAATAT | | HWGKIWLSALNLYKWEGV | |
| | AAAGGACCCATGTTCATGACAATCGGT | | NPAPPETWLLPYSLPMHPG | |
| | TACGTAGCCGTAAACTATATCGCCGGT | | RWWVHTRGVYIPVSYLSLV | |
| | ATTGAAATTCCTGAGCATGAGAGAATA | | KFSCPMTPLLEELRNEIYTK | |
| | GAATTAATTAGATACATCGTCAATACA | | PFDKINFSKNRNTVCGVDL | |
| | GCACATCCGGTTGATGGTGGCTGGGGT | | YYPHSTTLNIANSLVVFYEK | |
| | CTACATTCTGTTGACAAATCCACCGTG | | YLRNRFIYSLSKKKVYDLIK | |
| | TTTGGTACAGTATTGAACTATGTAATCT | | TELQNTDSLCIAPVNQAFC | |
| | TACGTTTATTGGGTCTACCCAAGGACC | | ALVTLIEEGVDSEAFQRLQ | |
| | ACCCGGTTTGCGCCAAGGCAAGAAGC | | YRFKDALFHGPQGMTIMGT | |
| | ACATTGTTAAGGTTAGGCGGTGCTATT | | NGVQTWDCAFAIQYFFVA | |
| | GGATCCCCTCACTGGGGAAAAATTTGG | | GLAERPEFYNTIVSAYKFLC | |
| | CTAAGTGCACTAAACTTGTATAAATGG | | HAQFDTECVPGSYRDKRKG | |
| | GAAGGTGTGAACCCTGCCCCTCCTGAA | | AWGFSTKTQGYTVADCTA | |
| | ACTTGGTTACTTCCATATTCACTGCCCA | | EAIKAIIMVKNSPVFSEVHH | |
| | TGCATCCGGGGAGATGGTGGGTTCATA | | MISSERLFEGIDVLLNLQNI | |
| | CTAGAGGTGTTTACATTCCGGTCAGTT | | GSFEYGSFATYEKIKAPLA | |
| | ACCTGTCATTGGTCAAATTTTCTTGCCC | | METLNPAEVFGNIMVEYPY | |
| | AATGACTCCTCTTCTTGAAGAACTGAG | | VECTDSSVLGLTYFHKYFD | |
| | GAATGAAATTTACACTAAACCGTTTGA | | YRKEEIRTRIRIAIEFIKKSQL | |
| | CAAGATTAACTTCTCCAAGAACAGGAA | | PDGSWYGSWGICFTYAGM | |
| | TACCGTATGTGGAGTAGACCTATATTA | | FALEALHTVGETYENSSTV | |
| | CCCCCATTCTACTACTTTGAATATTGCG | | RKGCDFLVSKQMKDGGWG | |
| | AACAGCCTTGTAGTATTTTACGAAAAA | | ESMKSSELHSYVDSEKSLV | |
| | TACCTAAGAAACCGGTTCATTTACTCT | | VQTAWALIALLFAEYPNKE | |
| | CTATCCAAGAAGAAGGTTTATGATCTA | | VIDRGIDLLKNRQEESGEW | |
| | ATCAAAACGGAGTTACAGAATACTGAT | | KFESVEGVFNHSCAIEYPSY | |
| | TCCTTGTGTATAGCACCTGTTAACCAG | | RFLFPIKALGMYSRAYETH | |
| | GCGTTTTGCGCACTTGTCACTCTTATTG | | TL | |
| | AAGAAGGGGTAGACTCGGAAGCGTTC | | | |
| | CAGCGTCTCCAATATAGGTTCAAGGAT | | | |
| | GCATTGTTCCATGGTCCACAGGGTATG | | | |
| | ACCATTATGGGAACAAATGGTGTGCAA | | | |
| | ACCTGGGATTGTGCGTTTGCCATTCAA | | | |
| | TACTTTTTCGTCGCAGGCCTCGCAGAA | | | |
| | AGACCTGAATTCTATAACACAATTGTC | | | |
| | TCTGCCTATAAATTCTTGTGTCATGCTC | | | |
| | AATTTGACACCGAGTGCGTTCCAGGTA | | | |
| | GTTATAGGGATAAGAGAAAGGGGGCT | | | |
| | TGGGGCTTCTCAACAAAAACACAGGGC | | | |
| | TATACAGTGGCAGATTGCACTGCAGAA | | | |
| | GCAATTAAAGCCATCATCATGGTGAAA | | | |
| | AACTCTCCCGTCTTTAGTGAAGTACAC | | | |
| | CATATGATTAGCAGTGAACGTTTATTT | | | |
| | GAAGGCATTGATGTGTTATTGAACCTA | | | |
| | CAAAACATCGGATCTTTTGAATATGGT | | | |
| | TCCTTTGCAACCTATGAAAAAATCAAG | | | |
| | GCCCCACTAGCAATGGAAACCTTGAAT | | | |
| | CCTGCTGAAGTTTTTGGTAACATAATG | | | |
| | GTAGAATACCCATACGTGGAATGTACT | | | |
| | GATTCATCCGTTCTGGGGTTGACATAT | | | |
| | TTTCACAAGTACTTCGACTATAGGAAA | | | |
| | GAGGAAATACGTACACGCATCAGAAT | | | |
| | CGCCATCGAATTCATAAAAAAATCTCA | | | |
| | ATTACCAGATGGAAGTTGGTATGGAAG | | | |
| | CTGGGGTATTTGTTTTACATATGCCGGT | | | |
| | ATGTTTGCATTGGAGGCATTACACACC | | | |
| | GTGGGGGAGACCTATGAGAATTCCTCA | | | |
| | ACGGTAAGAAAAGGTTGCGACTTCTTG | | | |
| | GTCAGTAAACAGATGAAGGATGGCGG | | | |
| | TTGGGGGGAATCAATGAAGTCCAGTGA | | | |
| | ATTACATAGTTATGTGGATAGTGAAAA | | | |
| | ATCGCTAGTCGTTCAAACCGCATGGGC | | | |
| | GCTAATTGCACTTCTTTTCGCTGAATAT | | | |
| | CCTAATAAAGAAGTCATCGACCGCGGT | | | |
| | ATTGACCTTTTAAAAAATAGACAAGAA | | | |
| | GAATCCGGGGAATGGAAATTTGAAAG | | | |
| | TGTAGAAGGTGTTTTCAACCACTCTTG | | | |
| | TGCAATTGAATACCCAAGTTATCGATT | | | |
| | CTTATTCCCTATTAAGGCATTAGGTAT | | | |
| | GTACAGCAGGGCATATGAAACACATA | | | |
| | CGCTTTAA | | | |
| 756247 | ATGACAGAATTTTATTCTGACACAATC | 80 | MTEFYSDTIGLPKTDPRLW | 100 |
| | GGTCTACCAAAGACAGATCCACGTCTT | | RLRTDELGRESWEYLTPQQ | |
| | TGGAGACTGAGAACTGATGAGCTAGG | | AANDPPSTFTQWLLQDPKF | |
| | CCGAGAAAGCTGGGAATATTTAACCCC | | PQPHPERNKHSPDFSAFDA | |
| | TCAGCAAGCCGCAAACGACCCACCATC | | CHNGASFFKLLQEPDSGIFP | |
| | CACTTTCACGCAGTGGCTTCTTCAAGA | | CQYKGPMFMTIGYVAVNYI | |
| | TCCCAAATTTCCTCAACCTCATCCAGA | | AGIEISEHERIELIRYIVNTV | |
| | AAGAAATAAGCATTCACCAGATTTTTC | | HPVDGGWGLHSVDKSTVF | |
| | AGCCTTCGATGCGTGTCATAATGGTGC | | GTVLNYVILRLLGLPKDHP | |
| | ATCTTTTTTCAAACTGCTTCAAGAGCCT | | VCAKARSTLLRLGGAIGSP | |
| | GACTCAGGTATTTTTCCGTGTCAATAT | | HWGKIWLSALNLYKWEGV | |
| | AAAGGACCCATGTTCATGACAATCGGT | | NPAPPETWLLPYSLPMHPG | |
| | TACGTAGCCGTAAACTATATCGCCGGT | | RWWVHTRGVYIPVSYLSLV | |
| | ATTGAAATTTCTGAGCATGAGAGAATA | | KFSCPMTPLLEELRNEIYTK | |
| | GAATTAATTAGATACATCGTCAATACA | | PFDKINFSKNRNTVCGVDL | |
| | GTACATCCGGTTGATGGTGGCTGGGGT | | YYPHSTTLNIANGLVVFYE | |
| | CTACATTCTGTTGACAAATCCACCGTG | | KYLRNRFIYSLSKKKGYDLI | |
| | TTTGGTACAGTATTAAACTATGTAATCT | | KTELQNTDSLCIAPVNQAF | |
| | TACGTTTATTGGGTCTACCCAAGGACC | | CALVTLIEEGVDSEAFQRLQ | |
| | ACCCGGTTTGCGCCAAGGCAAGAAGC | | YRFKDALFHGPQGMTIMGT | |
| | ACATTGTTAAGGTTAGGCGGTGCTATT | | NGVQTWDCAFAIQYFFVA | |
| | GGATCCCCTCACTGGGGAAAAATTTGG | | GLAERPEFYNTIVSAYKFLC | |
| | CTAAGTGCACTAAACTTGTATAAATGG | | HAQFDTECVPGSYRDERKG | |
| | GAAGGTGTGAACCCTGCCCCTCCTGAA | | AWGFSTKTQGYTVADCTA | |
| | ACTTGGTTACTTCCATATTCACTGCCCA | | EAIKAIIMVKNSPVFSEVHH | |
| | TGCATCCGGGGAGATGGTGGGTTCATA | | MISSERLFEGIDVLLNLQNI | |
| | CTAGAGGTGTTTACATTCCGGTCAGTT | | GSLEYGSFATYEKIKAPLA | |
| | ACCTGTCATTGGTCAAATTTTCTTGCCC | | METLNPAEVFGNIMVEYPY | |
| | AATGACTCCTCTTCTTGAAGAACTGAG | | VECTDSSVLGLTYFHKYFD | |
| | GAATGAAATTTACACTAAACCGTTTGA | | YRKEEIRTRIRIAIEFIKKSQL | |
| | CAAGATTAACTTCTCCAAGAACAGGAA | | PDGSWYGSWGICFTYAGM | |
| | TACCGTATGTGGAGTAGACCTATATTA | | FALEALHTVGETYENSSTV | |
| | CCCCCATTCTACTACTTTGAATATTGCG | | RKGCDFLVSKQMEDGGWG | |
| | AACGGCCTTGTAGTGTTTTACGAAAAA | | ESMKSSELHSYVDSEKSLV | |
| | TACCTAAGAAACCGGTTCATTTACTCT | | VQTAWALIALLFAEYPNKE | |
| | CTATCCAAGAAGAAGGGTTATGATCTA | | VIDRGIDLLKNRQEESGEW | |
| | ATCAAAACGGAGTTACAGAATACTGAT | | KFESVEGVFNHSCAIEYPSY | |
| | TCCTTGTGTATAGCACCTGTTAACCAG | | RFLFPIKALGMYSRA | |
| | GCGTTTTGCGCACTTGTCACTCTTATTG | | | |
| | AAGAAGGGGTAGACTCGGAAGCGTTC | | | |
| | CAGCGTCTCCAATATAGGTTCAAGGAT | | | |
| | GCATTGTTCCATGGTCCACAGGGTATG | | | |
| | ACCATTATGGGAACAAATGGTGTGCAA | | | |
| | ACCTGGGATTGTGCGTTTGCCATTCAA | | | |
| | TACTTTTTCGTCGCAGGCCTCGCAGAA | | | |
| | AGACCTGAATTCTATAACACAATTGTC | | | |
| | TCTGCCTATAAATTCTTGTGTCATGCTC | | | |
| | AATTTGACACCGAGTGCGTTCCAGGTA | | | |
| | GTTATAGGGATGAGAGAAAGGGGGCT | | | |
| | TGGGGCTTCTCAACAAAAACACAGGGC | | | |
| | TATACAGTGGCAGATTGCACTGCAGAA | | | |
| | GCAATTAAAGCCATCATCATGGTGAAA | | | |
| | AACTCTCCCGTCTTTAGTGAAGTACAC | | | |
| | CATATGATTAGCAGTGAACGTTTATTT | | | |
| | GAAGGCATTGATGTGTTATTGAACCTA | | | |
| | CAAAACATCGGATCTTTAGAATATGGT | | | |
| | TCCTTTGCAACCTATGAAAAAATCAAG | | | |
| | GCCCCACTAGCAATGGAAACCTTGAAT | | | |
| | CCTGCTGAAGTTTTTGGTAACATAATG | | | |
| | GTAGAATACCCATACGTGGAATGTACT | | | |
| | GATTCATCCGTTCTGGGGTTGACATAT | | | |
| | TTTCACAAGTACTTCGACTATAGGAAA | | | |
| | GAGGAAATACGTACACGCATCAGAAT | | | |
| | CGCCATCGAATTCATAAAAAAATCTCA | | | |
| | ACTACCAGATGGAAGTTGGTATGGAAG | | | |
| | CTGGGGTATTTGTTTTACATATGCCGGT | | | |
| | ATGTTTGCATTGGAGGCATTACACACC | | | |
| | GTGGGGGAGACCTATGAGAATTCCTCA | | | |
| | ACGGTAAGAAAAGGTTGCGACTTCTTG | | | |
| | GTCAGTAAACAGATGGAGGATGGCGG | | | |
| | TTGGGGGGAATCAATGAAGTCCAGTGA | | | |
| | ATTACATAGTTATGTGGATAGTGAAAA | | | |
| | ATCGCTAGTCGTTCAAACCGCATGGGC | | | |
| | GCTAATTGCACTTCTTTTCGCTGAATAT | | | |
| | CCTAATAAAGAAGTCATCGACCGCGGT | | | |
| | ATTGACCTTTTAAAAAATAGACAAGAA | | | |
| | GAATCCGGGGAATGGAAATTTGAAAG | | | |
| | TGTAGAAGGTGTTTTCAACCACTCTTG | | | |
| | TGCAATTGAATACCCAAGTTATCGATT | | | |
| | CTTATTCCCTATTAAGGCATTAGGTAT | | | |
| | GTACAGCAGGGCATAG | | | |
| 756248 | ATGACAGAATTTTATTCTGACACAATC | 81 | MTEFYSDTIGLPKTDPRLW | 101 |
| | GGTCTACCAAAGACAGATCCACGTCTT | | RLRTDELGRESWEYLTPQQ | |
| | TGGAGACTGAGAACTGATGAGCTAGG | | AANDPPSTFTQWLLQDPKF | |
| | CCGAGAAAGCTGGGAATATTTAACCCC | | PQPHPERNKHSPDFSAFDA | |
| | TCAGCAAGCCGCAAACGACCCACCATC | | CHNGASFFKLLQEPDSGIFP | |
| | CACTTTCACGCAGTGGCTTCTTCAAGA | | CQYKGPMFMTIGYVAVNYI | |
| | TCCCAAATTTCCTCAACCTCATCCAGA | | AGIEIPEHERIELIRYIVNTA | |
| | AAGAAATAAGCATTCACCAGATTTTTC | | HPVDGGWGLHSVDKSTVF | |
| | AGCCTTCGATGCGTGTCATAATGGTGC | | GTVLNYVILRLLGLPKDHP | |
| | ATCTTTTTTCAAACTGCTTCAAGAGCCT | | VCAKARSTLLRLGGAIGSP | |
| | GACTCAGGTATTTTTCCGTGTCAATAT | | HWGKIWLSALNLYKWEGV | |
| | AAAGGACCCATGTTCATGACAATCGGT | | NPAPPETWLLPYSLPMHPG | |
| | TACGTAGCTGTAAACTATATCGCCGGT | | RWWVHTRGVYIPVSYLSLV | |
| | ATTGAAATTCCTGAGCATGAGAGAATA | | KFSCPMTPLLEELRNEIYTS | |
| | GAATTAATTAGATACATCGTCAATACA | | PFDKINFSKNRNAVCGVDL | |
| | GCACATCCGGTTGATGGTGGCTGGGGT | | YYPHSTTLNIANSLVVFYEK | |
| | CTACATTCTGTTGACAAATCCACCGTG | | YLRNRFIYSLSKKKVYDLIK | |
| | TTTGGTACAGTATTGAACTATGTAATCT | | TELQNTDSLCIAPVNQAFC | |
| | TACGTTTATTGGGTCTACCCAAGGACC | | ALVTLIEEGVDSEAFQRLQ | |
| | ACCCGGTTTGCGCCAAGGCAAGAAGC | | YRFKDALFHGPQGMTIMGT | |
| | ACATTGTTAAGGTTAGGCGGTGCTATT | | NGVQTWDCAFAIQYFFVA | |
| | GGATCCCCTCACTGGGGAAAAATTTGG | | GLAERPEFYNTIVSAYKFLC | |
| | CTAAGTGCACTAAACTTGTATAAATGG | | HAQFDTECVPGSYRDKRKG | |
| | GAAGGTGTGAACCCTGCCCCTCCTGAA | | AWGFSTKTQGYTVADCTA | |
| | ACTTGGTTACTTCCATATTCACTGCCCA | | EAIKAIIMVKNSPVFSEVHH | |
| | TGCATCCGGGGAGATGGTGGGTTCATA | | MISSERLFEGIDVLLNLQNI | |
| | CTAGAGGTGTTTACATTCCGGTCAGTT | | GSLEYGSFATYEKIKAPLA | |
| | ACCTGTCATTGGTCAAATTTTCTTGCCC | | METLNPAEVFGNIMVEYPY | |
| | AATGACTCCTCTTCTTGAAGAACTGAG | | VECTDSSVLGLTYFHKYFD | |
| | GAATGAAATTTACACTAGTCCGTTTGA | | YRKEEIRTRIRIAIEFIKKSQL | |
| | CAAGATTAACTTCTCCAAGAACAGGAA | | PDGSWYGSWGICFTYAGM | |
| | TGCCGTATGTGGAGTAGACCTATATTA | | FALEALHNVGETYENSSTV | |
| | CCCCCATTCTACTACTTTGAATATTGCG | | RKGCDFLVSKQMKDGGWG | |
| | AACAGCCTTGTAGTATTTTACGAAAAA | | ESMKSSELHSYVDSEKSLV | |
| | TACCTAAGAAACCGGTTCATTTACTCT | | VQTTWALIALLFAEYPNKE | |
| | CTATCCAAGAAGAAGGTTTATGATCTA | | VIDRGIDLLKNRQEESGEW | |
| | ATCAAAACGGAGTTACAGAATACTGAT | | KFGSVEGVFNHSCAIEYPSY | |
| | TCCTTGTGTATAGCACCTGTTAACCAG | | RFLFPIKALGMYSRAYETH | |
| | GCGTTTTGCGCACTTGTCACTCTTATTG | | TL | |
| | AAGAAGGGGTAGACTCGGAAGCGTTC | | | |
| | CAGCGTCTCCAATATAGGTTCAAGGAT | | | |
| | GCATTGTTCCATGGTCCACAGGGTATG | | | |
| | ACCATTATGGGAACAAATGGTGTGCAA | | | |
| | ACCTGGGATTGTGCGTTTGCCATTCAA | | | |
| | TACTTTTTCGTCGCAGGCCTCGCAGAA | | | |
| | AGACCTGAATTCTATAACACAATTGTC | | | |
| | TCTGCCTATAAATTCTTGTGTCATGCTC | | | |
| | AATTTGACACCGAGTGCGTTCCAGGTA | | | |
| | GTTATAGGGATAAGAGAAAGGGGGCT | | | |
| | TGGGGCTTCTCAACAAAAACACAGGGC | | | |
| | TATACAGTGGCAGATTGCACTGCAGAA | | | |
| | GCAATTAAAGCCATCATCATGGTGAAA | | | |
| | AACTCTCCCGTCTTTAGTGAAGTACAC | | | |
| | CATATGATTAGCAGTGAACGTTTATTT | | | |
| | GAAGGCATTGATGTGTTATTGAACCTA | | | |
| | CAAAACATCGGATCTCTTGAATATGGT | | | |
| | TCCTTTGCAACCTATGAAAAAATCAAG | | | |
| | GCCCCACTAGCAATGGAAACCTTGAAT | | | |
| | CCTGCTGAAGTTTTTGGTAACATAATG | | | |
| | GTAGAATACCCATACGTGGAATGTACT | | | |
| | GATTCATCCGTTCTGGGGTTGACATAT | | | |
| | TTTCACAAGTACTTCGACTATAGGAAA | | | |
| | GAGGAAATACGTACACGCATCAGAAT | | | |
| | CGCCATCGAATTCATAAAAAAATCTCA | | | |
| | ATTACCAGATGGAAGTTGGTATGGAAG | | | |
| | CTGGGGTATTTGTTTTACATATGCCGGT | | | |
| | ATGTTTGCATTGGAGGCATTACACAAC | | | |
| | GTGGGGGAGACCTATGAGAATTCCTCA | | | |
| | ACGGTAAGAAAAGGTTGCGACTTCTTG | | | |
| | GTCAGTAAACAGATGAAGGATGGCGG | | | |
| | TTGGGGGGAATCAATGAAGTCCAGTGA | | | |
| | ATTACATAGTTATGTGGATAGTGAAAA | | | |
| | ATCGCTAGTCGTTCAAACCACATGGGC | | | |
| | GCTAATTGCACTTCTTTTCGCTGAATAT | | | |
| | CCTAATAAAGAAGTCATCGACCGCGGT | | | |
| | ATTGACCTTTTAAAAAATAGACAAGAA | | | |
| | GAATCCGGGGAATGGAAATTTGGAAG | | | |
| | TGTAGAAGGTGTTTTCAACCACTCTTG | | | |
| | TGCAATTGAATACCCAAGTTATCGATT | | | |
| | CTTATTCCCTATTAAGGCATTAGGTAT | | | |
| | GTACAGCAGGGCATATGAAACACATA | | | |
| | CGCTTTAA | | | |
| 756249 | ATGACAGAATTTTATTCTGACACAATC | 82 | MTEFYSDTIGLPKTDPRLW | 102 |
| | GGTCTACCAAAGACAGATCCACGTCTT | | RLRTDELGRESWEYLTPQQ | |
| | TGGAGACTGAGAACTGATGAGCTAGG | | AANDPPSTFTQWLLQDPKF | |
| | CCGAGAAAGCTGGGAATATTTAACCCC | | PQPHPEGNKHSPDFSAFDA | |
| | TCAGCAAGCCGCAAACGACCCACCATC | | CHNGASFFKLLQEPDSGIFP | |
| | CACTTTCACGCAGTGGCTTCTTCAAGA | | CQYKGPMFMTIGYVAVNYI | |
| | TCCCAAATTTCCTCAACCTCATCCAGA | | AGIEVPEHERIELIRYIVNTA | |
| | AGGAAATAAGCATTCACCAGATTTTTC | | HPVDGGWGLHSVDKSTVF | |
| | AGCCTTCGATGCGTGTCATAATGGTGC | | GTVLNYVILRLLGLPKDHP | |
| | ATCTTTTTTCAAACTGCTTCAAGAGCCT | | VCAKARSTLLRLGGAIGSP | |
| | GACTCAGGTATTTTTCCGTGTCAATAT | | HWGKIWLSALNLYKWEGV | |
| | AAAGGACCCATGTTCATGACAATCGGT | | NPAPPETWLLPYSLPIHPGR | |
| | TACGTAGCCGTAAACTATATCGCCGGT | | WWVHTRGVYIPVSYLSLV | |
| | ATTGAAGTTCCTGAGCATGAGAGAATA | | KFSCPMTPLLEELRNEIYTK | |
| | GAATTAATTAGATACATCGTCAATACA | | PFDKINISKNRNTVCGVDLY | |
| | GCACATCCGGTTGATGGTGGCTGGGGT | | YPHSTTLNIANSLVVFYEKY | |
| | CTACATTCTGTTGACAAATCCACCGTG | | LRNRFIYSLSKKKVYDLIKT | |
| | TTTGGTACAGTATTGAACTATGTAATCT | | ELQNADSLCIAPVNQAFCA | |
| | TACGTTTATTGGGTCTACCCAAGGACC | | LVTLIEEGVDSEAFQRLQYR | |
| | ACCCGGTTTGCGCCAAGGCAAGAAGC | | FKDALFHGPQGMTIMGTNG | |
| | ACATTGTTAAGGTTAGGCGGTGCTATT | | VQTWDCAFAIQYFFVAGLA | |
| | GGATCCCCTCACTGGGGAAAAATTTGG | | ERPEFYNTIVSAYKFLCHAQ | |
| | CTAAGTGCACTAAACTTGTATAAATGG | | FDTECVPGSYRDKRKGAW | |
| | GAAGGTGTGAACCCTGCCCCTCCTGAA | | GFSTKTQGYTVADCTAEAI | |
| | ACTTGGTTACTTCCATATTCACTGCCCA | | KAIIMVKNSPVFSEVHHMIS | |
| | TTCATCCGGGGAGATGGTGGGTTCATA | | SERLFEGIDVLLNLQNIGSF | |
| | CTAGAGGTGTTTACATTCCGGTCAGTT | | EYGSFATYEKIKAPLAMET | |
| | ACCTGTCATTGGTCAAATTTTCTTGCCC | | LNPAEVFGNIMVEYPYVEC | |
| | AATGACTCCTCTTCTTGAAGAACTGAG | | TDSSVLGLTYFHKYFDYRK | |
| | GAATGAAATTTACACTAAACCGTTTGA | | EEIRTRIRIAIEFIKKSQLPDG | |
| | CAAGATTAACATCTCCAAGAACAGGA | | SWYGSWGICFTYAGMFAL | |
| | ATACCGTATGTGGAGTAGACCTATATT | | EALHTVGETYENSSTVRKG | |
| | ACCCCCATTCTACTACTTTGAATATTGC | | SDFLVSKQMKDGGWGESM | |
| | GAACAGCCTTGTAGTATTTTACGAAAA | | KSSELHSYVDSEKSLVVQT | |
| | ATACCTAAGAAACCGGTTCATTTACTC | | AWALIALLFAEYPNKEVID | |
| | TCTATCCAAGAAGAAGGTTTATGATCT | | RGIDLLKNRQEESGEWKFE | |
| | AATCAAAACGGAGTTACAGAATGCTG | | SVEGVFNHSCAIEYPSYRFL | |
| | ATTCCTTGTGTATAGCACCTGTTAACC | | FPIKALGMYSRAYETHTL | |
| | AGGCGTTTTGCGCACTTGTCACTCTTAT | | | |
| | TGAAGAAGGGGTAGACTCGGAAGCGT | | | |
| | TCCAGCGTCTCCAATATAGGTTCAAGG | | | |
| | ATGCATTGTTCCATGGTCCACAGGGTA | | | |
| | TGACCATTATGGGAACAAATGGTGTGC | | | |
| | AAACCTGGGATTGTGCGTTTGCCATTC | | | |
| | AATACTTTTTCGTCGCAGGCCTCGCAG | | | |
| | AAAGACCTGAATTCTATAACACAATTG | | | |
| | TCTCTGCCTATAAATTCTTGTGTCATGC | | | |
| | TCAATTTGACACCGAGTGCGTTCCAGG | | | |
| | TAGTTATAGGGATAAGAGAAAGGGGG | | | |
| | CTTGGGGCTTCTCAACAAAAACACAGG | | | |
| | GCTATACAGTGGCAGATTGCACTGCAG | | | |
| | AAGCAATTAAAGCCATCATCATGGTGA | | | |
| | AAAACTCTCCCGTCTTTAGTGAAGTAC | | | |
| | ACCATATGATTAGCAGTGAACGTTTAT | | | |
| | TTGAAGGCATTGATGTGTTATTGAACC | | | |
| | TACAAAACATCGGATCTTTTGAATATG | | | |
| | GTTCCTTTGCAACCTATGAAAAAATCA | | | |
| | AGGCCCCACTAGCAATGGAAACCTTGA | | | |
| | ATCCTGCTGAAGTTTTTGGTAACATAA | | | |
| | TGGTAGAATACCCATACGTGGAATGTA | | | |
| | CTGATTCATCCGTTCTGGGGTTGACAT | | | |
| | ATTTTCACAAGTACTTCGACTATAGGA | | | |
| | AAGAGGAAATACGTACACGCATCAGA | | | |
| | ATCGCCATCGAATTCATAAAAAAATCT | | | |
| | CAATTACCAGATGGAAGTTGGTATGGA | | | |
| | AGCTGGGGTATTTGTTTTACATATGCC | | | |
| | GGTATGTTTGCATTGGAGGCATTACAC | | | |
| | ACCGTGGGGGAGACCTATGAGAATTCC | | | |
| | TCAACGGTAAGAAAAGGTAGCGACTTC | | | |
| | TTGGTCAGTAAACAGATGAAGGATGGC | | | |
| | GGTTGGGGGGAATCAATGAAGTCCAGT | | | |
| | GAATTACATAGTTATGTGGATAGTGAA | | | |
| | AAATCGCTAGTCGTTCAAACCGCATGG | | | |
| | GCGCTAATTGCACTTCTTTTCGCTGAAT | | | |
| | ATCCTAATAAAGAAGTCATCGACCGCG | | | |
| | GTATTGACCTTTTAAAAAATAGACAAG | | | |
| | AAGAATCCGGGGAATGGAAATTTGAA | | | |
| | AGTGTAGAAGGTGTTTTCAACCACTCT | | | |
| | TGTGCAATTGAATACCCAAGTTATCGA | | | |
| | TTCTTATTCCCTATTAAGGCATTAGGTA | | | |
| | TGTACAGCAGGGCATATGAAACACATA | | | |
| | CGCTTTAA | | | |
| N/A | ATGGGAATCCACGAAAGTGTGTCGAA | 2 | MGIHESVSKQFAKNGHSKY | 1 |
| (Wild- | ACAGTTTGCGAAAAACGGACATTCCAA | | RSDRYGLPKTDLRRWTFHA | |
| type | GTACCGCAGCGACCGATACGGCTTACC | | SDLGAQWWKYDDTTPLEE | |
| ERG7) | TAAGACGGATCTGCGACGATGGACGTT | | LEKRATDYVKYSLELPGYA | |
| | CCACGCGTCCGATCTGGGGGCGCAATG | | PVTLDSKPVKNAYEAALKN | |
| | GTGGAAGTATGACGATACCACACCGCT | | WHLFASLQDPDSGAWQSE | |
| | GGAAGAGCTGGAAAAGAGGGCTACCG | | YDGPQFMSIGYVTACYFGG | |
| | ACTACGTCAAATACTCGCTGGAGCTGC | | NEIPTPVKTEMIRYIVNTAH | |
| | CGGGATACGCGCCCGTGACTCTGGACT | | PVDGGWGLHKEDKSTCFG | |
| | CCAAGCCCGTGAAAAATGCCTACGAA | | TSINYVVLRLLGLSRDHPVC | |
| | GCGGCTCTCAAAAACTGGCATCTGTTT | | VKARKTLLTKFGGAINNPH | |
| | GCGTCGCTGCAAGACCCCGACTCCGGC | | WGKTWLSILNLYKWEGVN | |
| | GCATGGCAGTCGGAATACGACGGACC | | PAPGELWLLPYFVPVHPGR | |
| | GCAGTTCATGTCGATCGGTTATGTGAC | | WWVHTRWIYLAMGYLEA | |
| | GGCGTGCTACTTTGGCGGCAACGAGAT | | AEAQCELTPLLEELRDEIYK | |
| | CCCCACGCCGGTCAAAACCGAAATGAT | | KPYSEIDFSKHCNSISGVDL | |
| | CAGATACATTGTCAACACAGCCCACCC | | YYPHTGLLKFGNALLRRYR | |
| | AGTTGACGGAGGCTGGGGCCTTCACAA | | KFRPQWIKEKVKEEIYNLC | |
| | AGAAGACAAGAGCACCTGTTTCGGTAC | | LREVSNTRHLCLAPVNNAM | |
| | CAGCATCAACTACGTGGTCCTGCGACT | | TSIVMYLHEGPDSANYKKI | |
| | ACTGGGCCTGTCACGGGATCATCCGGT | | AARWPEFLSLNPSGMFMN | |
| | CTGCGTCAAGGCGCGCAAAACGCTGCT | | GTNGLQVWDTAFAVQYAC | |
| | CACCAAGTTTGGCGGCGCCATCAACAA | | VCGFAELPQYQKTIRAAFD | |
| | CCCCCATTGGGGCAAGACCTGGCTGTC | | FLDRSQINEPTEENSYRDDR | |
| | GATTCTCAATCTCTACAAATGGGAGGG | | VGGWPFSTKTQGYPVSDCT | |
| | TGTGAATCCGGCCCCTGGCGAGCTCTG | | AEALKAIIMVQNTPGYEDL | |
| | GCTGTTGCCCTACTTTGTTCCTGTTCAT | | KKQVSDKRKHTAIDLLLGM | |
| | CCGGGCCGATGGTGGGTCCATACCCGG | | QNVGSFEPGSFASYEPIRAS | |
| | TGGATCTACCTTGCCATGGGCTATCTG | | SMLEKINPAEVFGNIMVEY | |
| | GAGGCTGCGGAGGCCCAATGCGAACT | | PYVECTDSVVLGLSYFRKY | |
| | CACTCCGTTGCTGGAGGAGCTCCGAGA | | HDYRNEDVDRAISAAIGYII | |
| | CGAAATCTACAAAAAGCCCTACTCGGA | | REQQPDGGFFGSWGVCYC | |
| | GATTGATTTCTCCAAACATTGCAACTC | | YAHMFAMEALETQNLNYN | |
| | CATCTCCGGAGTCGACCTCTACTATCC | | NCSTVQKACDFLAGYQEA | |
| | CCACACCGGCCTTTTGAAGTTTGGCAA | | DGGWAEDFKSCETQMYVR | |
| | CGCGCTTCTCCGACGATACCGCAAGTT | | GPHSLVVPTAMALLSLMSG | |
| | CAGACCGCAGTGGATCAAAGAAAAGG | | RYPQEDKIHAAARFLMSKQ | |
| | TCAAGGAGGAAATTTACAACTTGTGCC | | MSNGEWLKEEMEGVFNHT | |
| | TTCGAGAGGTTTCCAACACACGACACT | | CAIEYPNYRFYFVMKALGL | |
| | TGTGTCTCGCTCCCGTCAACAATGCCA | | YFKGYCQ | |
| | TGACCTCCATTGTCATGTATCTCCATGA | | | |
| | GGGGCCCGATTCGGCGAATTACAAAA | | | |
| | AGATTGCGGCCCGATGGCCCGAATTTC | | | |
| | TGTCTCTGAATCCGTCGGGAATGTTTA | | | |
| | TGAACGGCACCAACGGTCTGCAGGTCT | | | |
| | GGGATACTGCGTTTGCCGTGCAATACG | | | |
| | CGTGTGTTTGTGGCTTTGCCGAACTTCC | | | |
| | CCAGTACCAGAAGACGATCCGAGCGG | | | |
| | CGTTTGATTTTCTCGATCGGTCCCAGAT | | | |
| | CAACGAGCCGACGGAGGAAAATTCCT | | | |
| | ATCGAGACGACCGCGTCGGAGGATGG | | | |
| | CCCTTTAGTACCAAGACCCAGGGGTAT | | | |
| | CCAGTCTCCGACTGTACTGCCGAGGCT | | | |
| | CTCAAGGCCATCATCATGGTCCAGAAT | | | |
| | ACGCCTGGATACGAGGATCTGAAGAA | | | |
| | ACAAGTGTCTGACAAGCGGAAACACA | | | |
| | CTGCCATCGATCTACTTTTGGGAATGC | | | |
| | AGAACGTGGGCTCGTTTGAACCGGGCT | | | |
| | CTTTCGCCTCCTATGAGCCTATCCGGG | | | |
| | CGTCGTCCATGCTGGAGAAGATCAATC | | | |
| | CGGCCGAGGTGTTTGGAAACATCATGG | | | |
| | TGGAGTATCCGTACGTGGAATGCACTG | | | |
| | ATTCTGTTGTTCTGGGTCTGTCCTACTT | | | |
| | TCGAAAGTACCACGATTACCGCAACGA | | | |
| | AGACGTGGACCGAGCCATCTCTGCTGC | | | |
| | CATTGGATACATTATTCGAGAGCAGCA | | | |
| | GCCTGACGGCGGCTTCTTTGGCTCCTG | | | |
| | GGGCGTGTGCTACTGCTACGCTCACAT | | | |
| | GTTTGCCATGGAGGCTCTGGAGACGCA | | | |
| | GAATCTCAACTATAACAACTGTTCCAC | | | |
| | GGTTCAAAAGGCGTGCGACTTTCTGGC | | | |
| | GGGCTACCAGGAAGCAGATGGAGGCT | | | |
| | GGGCCGAGGACTTTAAGTCGTGCGAGA | | | |
| | CTCAGATGTACGTGCGCGGACCCCATT | | | |
| | CGCTGGTCGTGCCTACTGCCATGGCCC | | | |
| | TGTTGAGTTTGATGAGTGGTCGGTATC | | | |
| | CCCAGGAGGACAAGATTCATGCTGCGG | | | |
| | CCCGGTTTCTCATGAGCAAGCAGATGA | | | |
| | GCAACGGTGAGTGGCTCAAGGAGGAG | | | |
| | ATGGAGGGGGTGTTTAACCATACTTGT | | | |
| | GCCATTGAGTATCCCAACTACCGGTTT | | | |
| | TATTTTGTCATGAAGGCTTTGGGGTTGT | | | |
| | ATTTCAAGGGATATTGCCAGTGA | | | |
| 2F1 | ATGGGAATCCACGAAAGTGTGTCGAA | 103 | MGIHESVSKQFAKNGHSKY | 118 |
| | ACAGTTTGCGAAAAACGGACATTCCAA | | RSDRYGLPKTDLRRWTFHA | |
| | GTACCGCAGCGACCGATACGGCTTACC | | SDLGAQWWKYDDTTPLEE | |
| | TAAGACGGATCTGCGACGATGGACGTT | | LEKRATDYVKYSLELPGYA | |
| | CCACGCGTCCGATCTGGGGGCGCAATG | | PVTLDSKPVKNAYEAALKN | |
| | GTGGAAGTATGACGATACCACACCGCT | | WHLFASLQDPDSGAWQSE | |
| | GGAAGAGCTGGAAAAGAGGGCTACCG | | YDGPQFMSIGYVTACYFGG | |
| | ACTACGTCAAATACTCGCTGGAGCTGC | | NEIPTPVKTEMIRYIVNTAH | |
| | CGGGATACGCGCCCGTGACTCTGGACT | | PVDGGWGLHKEDKSTCFG | |
| | CCAAGCCCGTGAAAAATGCCTACGAA | | TSINYVVLRLLGLSRDHPVC | |
| | GCGGCTCTCAAAAACTGGCATCTGTTT | | VKARKTLLTKFGGAINNPH | |
| | GCGTCGCTGCAAGACCCCGACTCCGGC | | WGKTWLSILNLYKWEGVN | |
| | GCATGGCAGTCGGAATACGACGGACC | | PAPGELWLLPYFVPVHPGR | |
| | GCAGTTCATGTCGATCGGTTATGTGAC | | WWFHTRWIYLAMGYLEAA | |
| | GGCGTGCTACTTTGGCGGCAACGAGAT | | EAQCELTPLLEELRDEIYKK | |
| | CCCCACGCCGGTCAAAACCGAAATGAT | | PYSEIDFSKHCNSISGVDLY | |
| | CAGATACATTGTCAACACAGCCCACCC | | YPHTGLLKFGNALLRRYRK | |
| | AGTTGACGGAGGCTGGGGCCTTCACAA | | FRPQWIKEKVKEEIYNLCLR | |
| | AGAAGACAAGAGCACCTGTTTCGGTAC | | EVSNTRHLCLAPVNNAMTS | |
| | CAGCATCAACTACGTGGTCCTGCGACT | | IVMYLHEGPVSANYKKIAA | |
| | ACTGGGCCTGTCACGGGATCATCCGGT | | RWPEFLSLNPSGMFMNGTN | |
| | CTGCGTCAAGGCGCGCAAAACGCTGCT | | GLQVWDTAFAVQYACVCG | |
| | CACCAAGTTTGGCGGCGCCATCAACAA | | FAELPQYQKTIRAAFDFLDR | |
| | CCCCCATTGGGGCAAGACCTGGCTGTC | | SQINEPTEENSYRDDRVGG | |
| | GATTCTCAATCTCTACAAATGGGAGGG | | WPFSTKTQGYPVSDCTAEA | |
| | TGTGAATCCGGCCCCTGGCGAGCTCTG | | LKAIIMVQNTPGYEDLKKQ | |
| | GCTGTTGCCCTACTTTGTTCCTGTTCAT | | VSDKRKHTAIDLLLGMQNV | |
| | CCGGGCCGATGGTGGTTCCATACCCGG | | GSFEPGSFASYEPIRASSML | |
| | TGGATCTACCTTGCCATGGGCTATCTG | | EKINPAEVFGNIMVEYPYV | |
| | GAGGCTGCGGAGGCCCAATGCGAACT | | ECTDSVVLGLSYFRKYHDY | |
| | CACTCCGTTGCTGGAGGAGCTCCGAGA | | RNEDVDRAISAAIGYIIREQ | |
| | CGAAATCTACAAAAAGCCCTACTCGGA | | QPDGGFFGSWGVCYCYAH | |
| | GATTGATTTCTCCAAACATTGCAACTC | | MFAMEALETQNLNYNNCS | |
| | CATCTCCGGAGTCGACCTCTACTATCC | | TVQKACDFLAGYQEADGG | |
| | CCACACCGGCCTTTTGAAGTTTGGCAA | | WAEDFKSCETQMYVRGPH | |
| | CGCGCTTCTCCGACGATACCGCAAGTT | | SLVVPTAMALLSLMSGRYP | |
| | CAGACCGCAGTGGATCAAAGAAAAGG | | QEDKIHAAARFLMSKQMS | |
| | TCAAGGAGGAAATTTACAACTTGTGCC | | NDEWLKEEMEGVFNHTCAI | |
| | TTCGAGAGGTTTCCAACACACGACACT | | EYPNYRFYFVMKALGLYFK | |
| | TGTGTCTCGCTCCCGTCAACAATGCCA | | GYCQ | |
| | TGACCTCCATTGTCATGTATCTCCATGA | | | |
| | GGGGCCCGTTTCGGCGAATTACAAAAA | | | |
| | GATTGCGGCCCGATGGCCCGAATTTCT | | | |
| | GTCTCTGAATCCGTCGGGAATGTTTAT | | | |
| | GAACGGCACCAACGGTCTGCAGGTCTG | | | |
| | GGATACTGCGTTTGCCGTGCAATACGC | | | |
| | GTGTGTTTGTGGCTTTGCCGAACTTCCC | | | |
| | CAGTACCAGAAGACGATCCGAGCGGC | | | |
| | GTTTGATTTTCTCGATCGGTCCCAGATC | | | |
| | AACGAGCCGACGGAGGAAAATTCCTA | | | |
| | TCGAGACGACCGCGTCGGAGGATGGC | | | |
| | CCTTTAGTACCAAGACCCAGGGGTATC | | | |
| | CAGTCTCCGACTGTACTGCCGAGGCTC | | | |
| | TCAAGGCCATCATCATGGTCCAGAATA | | | |
| | CGCCTGGATACGAGGATCTGAAGAAA | | | |
| | CAAGTGTCTGACAAGCGGAAACACACT | | | |
| | GCCATCGATCTACTTTTGGGAATGCAG | | | |
| | AACGTGGGCTCGTTTGAACCGGGCTCT | | | |
| | TTCGCCTCCTATGAGCCTATCCGGGCG | | | |
| | TCGTCCATGCTGGAGAAGATCAATCCG | | | |
| | GCCGAGGTGTTTGGAAACATCATGGTG | | | |
| | GAGTATCCGTACGTGGAATGCACTGAT | | | |
| | TCTGTTGTTCTGGGTCTGTCCTACTTTC | | | |
| | GAAAGTACCACGATTACCGCAACGAA | | | |
| | GACGTGGACCGAGCCATCTCTGCTGCC | | | |
| | ATTGGATACATTATTCGAGAGCAGCAG | | | |
| | CCTGACGGCGGCTTCTTTGGCTCCTGG | | | |
| | GGCGTGTGCTACTGCTACGCTCACATG | | | |
| | TTTGCCATGGAGGCTCTGGAGACGCAG | | | |
| | AATCTCAACTATAACAACTGTTCCACG | | | |
| | GTTCAAAAGGCGTGCGACTTTCTGGCG | | | |
| | GGCTACCAGGAAGCAGATGGAGGCTG | | | |
| | GGCCGAGGACTTTAAGTCGTGCGAGAC | | | |
| | TCAGATGTACGTGCGCGGACCCCATTC | | | |
| | GCTGGTCGTGCCTACTGCCATGGCCCT | | | |
| | GTTGAGTTTGATGAGTGGTCGGTATCC | | | |
| | CCAGGAGGACAAGATTCATGCTGCGGC | | | |
| | CCGGTTTCTCATGAGCAAGCAGATGAG | | | |
| | CAACGATGAGTGGCTCAAGGAGGAGA | | | |
| | TGGAGGGGGTGTTTAACCATACTTGTG | | | |
| | CCATTGAGTATCCCAACTACCGGTTTT | | | |
| | ATTTTGTCATGAAGGCTTTGGGGTTGT | | | |
| | ATTTCAAGGGATATTGCCAGTGA | | | |
| 2F11 | ATGGGAATCCACGAAAGTGTGTCGAA | 104 | MGIHESVSKQFAKNGHSKY | 119 |
| | ACAGTTTGCGAAAAACGGACATTCCAA | | RSDRYGLPKTDLRRWTFHA | |
| | GTACCGCAGCGACCGATACGGCTTACC | | SDLGAQWWKYDDTTPLEE | |
| | TAAGACGGATCTGCGACGATGGACGTT | | LEKRATDYVKYSLELPGYA | |
| | CCACGCGTCCGATCTGGGGGCGCAATG | | PVTLDSKPVKNAYEAALKN | |
| | GTGGAAGTATGACGATACCACACCGCT | | WHLFASLQDPDSGAWQSE | |
| | GGAAGAGCTGGAAAAGAGGGCTACCG | | YDGPQFMSIGYVTACYFGG | |
| | ACTACGTCAAATACTCGCTGGAGCTGC | | NEIPTPVKTEMIRYIVNTAH | |
| | CGGGATACGCGCCCGTGACTCTGGACT | | PVDGGWGLHKEDKSTCFG | |
| | CCAAGCCCGTGAAAAATGCCTACGAA | | TSINYVVLRLLGLSWDHPV | |
| | GCGGCTCTCAAAAACTGGCATCTGTTT | | CVKARKTLLTKFGGAINNP | |
| | GCGTCGCTGCAAGACCCCGACTCCGGC | | HWGKTWLSILNLYKWEGV | |
| | GCATGGCAGTCGGAATACGACGGACC | | NPAPGELWLMPYFVPVHPG | |
| | GCAGTTCATGTCGATCGGTTATGTGAC | | RWWVHTRWIYLAMGYRE | |
| | GGCGTGCTACTTTGGCGGCAACGAGAT | | AAEAQCELTPLLEELRDEIY | |
| | CCCCACGCCGGTCAAAACCGAAATGAT | | KKPYSEIDFSKHCNSISGVD | |
| | CAGATACATTGTCAACACAGCCCACCC | | LYYPHTGLLKFGNALLRRY | |
| | AGTTGACGGAGGCTGGGGCCTTCACAA | | RKFRPQWIKEKVKEEIYNL | |
| | AGAAGACAAGAGCACCTGTTTCGGTAC | | CLREVSNTRHLCLAPVNNA | |
| | CAGCATCAACTACGTGGTCCTGCGACT | | MTSIVMYLHEGPDSANYKK | |
| | ACTGGGCCTGTCATGGGATCATCCGGT | | IAARWPEFLSLNPSGMFMN | |
| | CTGCGTCAAGGCGCGCAAAACGCTGCT | | GTNGLQVWDTAFAVQYAC | |
| | CACCAAGTTTGGCGGCGCCATCAACAA | | VCGFAELPQYQKTIRAAFD | |
| | CCCCCATTGGGGCAAGACCTGGCTGTC | | FLDRSQINEPTEENSYRDDR | |
| | GATTCTCAATCTCTACAAATGGGAGGG | | VGGWPFSTKTQGYPVSDCT | |
| | TGTGAATCCGGCCCCTGGCGAGCTCTG | | AEALKAIIMVQNTPGYEDL | |
| | GCTGATGCCCTACTTTGTTCCTGTTCAT | | KKQVSDKRKHTAIDLLLGM | |
| | CCGGGCCGATGGTGGGTCCATACCCGG | | QNVGSFEPGSFASYEPIRAS | |
| | TGGATCTACCTTGCCATGGGCTATCGG | | SMLEKINPAEVFGNIMVEY | |
| | GAGGCTGCGGAGGCCCAATGCGAACT | | PYVECTDSVVLGLSYFRKY | |
| | CACTCCGTTGCTGGAGGAGCTCCGAGA | | HDYRNEDVDRAISAAIGYII | |
| | CGAAATCTACAAAAAGCCCTACTCGGA | | REQQPDGGFFGSWGVCYC | |
| | GATTGATTTCTCCAAACATTGCAACTC | | YAHMFAMEALETQNLNYN | |
| | CATCTCCGGAGTCGACCTCTACTATCC | | NCSTVQKACDFLAGYQEA | |
| | CCACACCGGCCTTTTGAAGTTTGGCAA | | DGGWAEDFKSCETQMYVR | |
| | CGCGCTTCTCCGACGATACCGCAAGTT | | GPHSLVVPTAMALLSLMSG | |
| | CAGACCGCAGTGGATCAAAGAAAAGG | | RYPQEDKIHAAARFLMSKQ | |
| | TCAAGGAGGAAATTTACAACTTGTGCC | | MSNGEWLKEEMQGVFNHT | |
| | TTCGAGAGGTTTCCAACACACGACACT | | CAIEYPNYRFYFVMKALGL | |
| | TGTGTCTCGCTCCCGTCAACAATGCCA | | YFKGYCQ | |
| | TGACCTCCATTGTCATGTATCTCCATGA | | | |
| | GGGGCCCGATTCGGCGAATTACAAAA | | | |
| | AGATTGCGGCCCGATGGCCCGAATTTC | | | |
| | TGTCTCTGAATCCGTCGGGAATGTTTA | | | |
| | TGAACGGCACCAACGGTCTGCAGGTCT | | | |
| | GGGATACTGCGTTTGCCGTGCAATACG | | | |
| | CGTGTGTTTGTGGCTTTGCCGAACTTCC | | | |
| | CCAGTACCAGAAGACGATCCGAGCGG | | | |
| | CGTTTGATTTTCTCGATCGGTCCCAGAT | | | |
| | CAACGAGCCGACGGAGGAAAATTCCT | | | |
| | ATCGAGACGACCGCGTCGGAGGATGG | | | |
| | CCCTTTAGTACCAAGACCCAGGGGTAT | | | |
| | CCAGTCTCCGACTGTACTGCCGAGGCT | | | |
| | CTCAAGGCCATCATCATGGTCCAGAAT | | | |
| | ACGCCTGGATACGAGGATCTGAAGAA | | | |
| | ACAAGTGTCTGACAAGCGGAAACACA | | | |
| | CTGCCATCGATCTACTTTTGGGAATGC | | | |
| | AGAACGTGGGCTCGTTTGAACCGGGCT | | | |
| | CTTTCGCCTCCTATGAGCCTATCCGGG | | | |
| | CGTCGTCCATGCTGGAGAAGATCAATC | | | |
| | CGGCCGAGGTGTTTGGAAACATCATGG | | | |
| | TGGAGTATCCGTACGTGGAATGCACTG | | | |
| | ATTCTGTTGTTCTGGGTCTGTCCTACTT | | | |
| | TCGAAAGTACCACGATTACCGCAACGA | | | |
| | AGACGTGGACCGAGCCATCTCTGCTGC | | | |
| | CATTGGATACATTATTCGAGAGCAGCA | | | |
| | GCCTGACGGCGGCTTCTTTGGCTCCTG | | | |
| | GGGCGTGTGCTACTGCTACGCTCACAT | | | |
| | GTTTGCCATGGAGGCTCTGGAGACGCA | | | |
| | GAATCTCAACTATAACAACTGTTCCAC | | | |
| | GGTTCAAAAGGCGTGCGACTTTCTGGC | | | |
| | GGGCTACCAGGAAGCAGATGGAGGCT | | | |
| | GGGCCGAGGACTTTAAGTCGTGCGAGA | | | |
| | CTCAGATGTACGTGCGCGGACCCCATT | | | |
| | CGCTGGTCGTGCCTACTGCCATGGCCC | | | |
| | TGTTGAGTTTGATGAGTGGTCGGTATC | | | |
| | CCCAGGAGGACAAGATTCATGCTGCGG | | | |
| | CCCGGTTTCTCATGAGCAAGCAGATGA | | | |
| | GCAACGGTGAGTGGCTCAAGGAGGAG | | | |
| | ATGCAGGGGGTGTTTAACCATACTTGT | | | |
| | GCCATTGAGTATCCCAACTACCGGTTT | | | |
| | TATTTTGTCATGAAGGCTTTGGGGTTGT | | | |
| | ATTTCAAGGGATATTGCCAGTGA | | | |
| 3A8 | ATGGGAATCCACGAAAGTGTGTCGAA | 105 | MGIHESVSKQFAKNGHSKY | 120 |
| | ACAGTTTGCGAAAAACGGACATTCCAA | | RSDRYGLPKTDLRRWTFHA | |
| | GTACCGCAGCGACCGATACGGCTTACC | | SDLGAQWWKYDDTTPLEE | |
| | TAAGACGGATCTGCGACGATGGACGTT | | LEKRATDYVKYSLELPGYA | |
| | CCACGCGTCCGATCTGGGGGCGCAATG | | PVTLDSKPVKNAYEAALKN | |
| | GTGGAAGTATGACGATACCACACCGCT | | WHLFASLQDPDSGAWQSE | |
| | GGAAGAGCTGGAAAAGAGGGCTACCG | | YDGPQFMSIGYVTACYFGG | |
| | ACTACGTCAAATACTCGCTGGAGCTGC | | NEIPTPVKTEMIRYIVNTAH | |
| | CGGGATACGCGCCCGTGACTCTGGACT | | PVDGGWGLHKEDKSTCFG | |
| | CCAAGCCCGTGAAAAATGCCTACGAA | | TSINYVVLRLLGLSRDHPVC | |
| | GCGGCTCTCAAAAACTGGCATCTGTTT | | VKARKTLLTKFGGAINNPH | |
| | GCGTCGCTGCAAGACCCCGACTCCGGC | | WGKTWLSILNLYKWEGVN | |
| | GCATGGCAGTCGGAATACGACGGACC | | PAPGELWLLPYFVPVHPGR | |
| | GCAGTTCATGTCGATCGGTTATGTGAC | | WWVHTRWIYLAMGYLEA | |
| | GGCGTGCTACTTTGGCGGCAACGAGAT | | AEAQCELTPLLEELRDEIYK | |
| | CCCCACGCCGGTCAAAACCGAAATGAT | | KPYSEIDFSKHCNSISGVDL | |
| | CAGATACATTGTCAACACAGCCCACCC | | YYPHTGLLKFGNALLRRYR | |
| | AGTTGACGGAGGCTGGGGCCTTCACAA | | KFRPQWIKEKVKEEIYNLC | |
| | AGAAGACAAGAGCACCTGTTTCGGTAC | | LREVSNTRHLCLAPVNNAM | |
| | CAGCATCAACTACGTGGTCCTGCGACT | | TSIVMYLHEGPDSANYKKI | |
| | ACTGGGCCTGTCACGGGATCATCCGGT | | AARWPEFLSLNPSGMFMN | |
| | CTGCGTCAAGGCGCGCAAAACGCTGCT | | GTNGLQVWDTAFAVQYAC | |
| | CACCAAGTTTGGCGGCGCCATCAACAA | | VCGFAELPQYQKTIRAAFD | |
| | CCCCCATTGGGGCAAGACCTGGCTGTC | | FLDRSQINEPTEENSYRDDR | |
| | GATTCTCAATCTCTACAAATGGGAGGG | | VGGWPFSTKTQGYPVSDCT | |
| | TGTGAATCCGGCCCCTGGCGAGCTCTG | | AEALKAIIMVQNTPGYEDQ | |
| | GCTGTTGCCCTACTTTGTTCCTGTTCAT | | KKQVSDKRKHTAIDLLLGM | |
| | CCGGGCCGATGGTGGGTCCACACCCGG | | QNVGSFEPGSFASYEPIRAS | |
| | TGGATCTACCTTGCCATGGGCTATCTG | | SMLEKINPAEVFGNIMVEY | |
| | GAGGCTGCGGAGGCCCAATGCGAACT | | PYVECTDSVVLGLSYFRKY | |
| | CACTCCGTTGCTGGAGGAGCTCCGAGA | | HDYRNEDVDRAISAAIGFII | |
| | CGAAATCTACAAAAAGCCCTACTCGGA | | REQQPDGGFFGSWGVCYC | |
| | GATTGATTTCTCCAAACATTGCAACTC | | YAHMFAMEALETQNLNYN | |
| | CATCTCCGGAGTCGACCTCTACTATCC | | NCSTVQKACDFLAGYQEA | |
| | CCACACCGGCCTTTTGAAGTTTGGCAA | | DGGWAEDFKSCETQMYVH | |
| | CGCGCTTCTCAGACGATACCGCAAGTT | | GPHSLVVPTAMALLSLMSG | |
| | CAGACCGCAGTGGATCAAAGAAAAGG | | RYPQEDKIHAAARFLMSKQ | |
| | TCAAGGAGGAAATTTACAACTTGTGCC | | MSNGEWLKEEMEGVFNHT | |
| | TTCGAGAGGTTTCCAACACACGACACT | | CAIEYPNYRFYFVMKALGL | |
| | TGTGTCTCGCTCCCGTCAACAATGCCA | | YFKGYCQ | |
| | TGACCTCCATTGTCATGTATCTCCATGA | | | |
| | GGGGCCCGATTCGGCGAATTACAAAA | | | |
| | AGATTGCGGCCCGATGGCCCGAATTTC | | | |
| | TGTCTCTGAATCCGTCGGGAATGTTTA | | | |
| | TGAACGGCACCAACGGTCTGCAGGTCT | | | |
| | GGGATACTGCGTTTGCCGTGCAATACG | | | |
| | CGTGTGTTTGTGGCTTTGCCGAACTTCC | | | |
| | CCAGTACCAGAAGACGATCCGAGCGG | | | |
| | CGTTTGATTTTCTCGATCGGTCCCAGAT | | | |
| | CAACGAGCCGACGGAGGAAAATTCCT | | | |
| | ATCGAGACGACCGCGTCGGAGGATGG | | | |
| | CCCTTTAGTACCAAGACCCAGGGGTAT | | | |
| | CCAGTCTCCGACTGTACTGCCGAGGCT | | | |
| | CTCAAGGCCATCATCATGGTCCAGAAT | | | |
| | ACGCCTGGATACGAGGATCAGAAGAA | | | |
| | ACAAGTGTCTGACAAGCGGAAACACA | | | |
| | CTGCCATCGATCTACTTTTGGGAATGC | | | |
| | AGAACGTGGGCTCGTTTGAACCGGGCT | | | |
| | CTTTCGCCTCCTATGAGCCTATCCGGG | | | |
| | CGTCGTCCATGCTGGAGAAGATCAATC | | | |
| | CGGCCGAGGTGTTTGGAAACATCATGG | | | |
| | TGGAGTATCCGTACGTGGAATGCACTG | | | |
| | ATTCTGTTGTTCTGGGTCTGTCCTACTT | | | |
| | TCGAAAGTACCACGATTACCGCAACGA | | | |
| | AGACGTGGACCGAGCCATCTCTGCTGC | | | |
| | CATTGGATTCATTATTCGAGAGCAGCA | | | |
| | GCCTGACGGCGGCTTCTTTGGCTCCTG | | | |
| | GGGCGTGTGCTACTGCTACGCTCACAT | | | |
| | GTTTGCCATGGAGGCTCTGGAGACGCA | | | |
| | GAATCTCAACTATAACAACTGTTCCAC | | | |
| | GGTTCAAAAGGCGTGCGACTTTCTGGC | | | |
| | GGGCTACCAGGAAGCAGATGGAGGCT | | | |
| | GGGCCGAGGACTTTAAGTCGTGCGAGA | | | |
| | CTCAGATGTACGTGCACGGACCCCATT | | | |
| | CGCTGGTCGTGCCTACTGCCATGGCCC | | | |
| | TGTTGAGTTTGATGAGTGGTCGGTATC | | | |
| | CCCAGGAGGACAAGATTCATGCTGCGG | | | |
| | CCCGGTTTCTCATGAGCAAGCAGATGA | | | |
| | GCAACGGTGAGTGGCTCAAGGAGGAG | | | |
| | ATGGAGGGGGTGTTTAACCATACTTGT | | | |
| | GCCATTGAGTATCCCAACTACCGGTTT | | | |
| | TATTTTGTCATGAAGGCTTTGGGGTTGT | | | |
| | ATTTCAAGGGATATTGCCAGTGA | | | |
| 3B9 | ATGGGAATCCACGAAAGTGTGTCGAA | 106 | MGIHESVSKQFAKNGHSKY | 316 |
| | ACAGTTTGCGAAAAACGGACATTCCAA | | RSDRYGLPKTDLRRWTFHA | |
| | GTACCGCAGCGACCGATACGGCTTACC | | SDLGAQWWKYDDTTPLEE | |
| | TAAGACGGATCTGCGACGATGGACGTT | | LEKRATDYVKYSLELPGYA | |
| | CCACGCGTCCGATCTGGGGGCGCAATG | | PVTLDSKPVKNAYEAALKN | |
| | GTGGAAGTATGACGATACCACACCGCT | | WHLFASLQDPDSGAWQSE | |
| | GGAAGAGCTGGAAAAGAGGGCTACTG | | YDGPQFMSICYVTACYFGG | |
| | ACTACGTCAAATACTCGCTGGAGCTGC | | NEIPTPVKTEMIRYIVNTAH | |
| | CGGGATACGCGCCCGTGACTCTGGACT | | PVDGGWGLHKEDKSTCFG | |
| | CCAAGCCCGTGAAGAATGCCTACGAA | | TSINYVVLRLLGLSRDHPVC | |
| | GCGGCTCTCAAAAACTGGCATCTGTTT | | VKARKTLLTKFGGAINNPH | |
| | GCGTCGCTGCAAGACCCCGACTCCGGC | | WGKTWLSILNLYKWEGVN | |
| | GCATGGCAGTCGGAATACGACGGACC | | PAPGELWLLPYFVPVHPGR | |
| | GCAGTTCATGTCGATCTGTTATGTGAC | | WWVLTRWIYLAMGYLEAA | |
| | GGCGTGCTACTTTGGCGGCAACGAGAT | | EAQCELTPLLEELRDEIYKK | |
| | CCCCACGCCGGTCAAAACCGAAATGAT | | PYSEIDFSKHCNSISGVDLY | |
| | CAGATACATTGTCAACACAGCCCACCC | | YPHTGLLKFGNALLRRYRK | |
| | AGTTGACGGAGGCTGGGGCCTTCACAA | | FRPQWIKEKVKEEIYNLCLR | |
| | AGAAGACAAGAGCACCTGTTTCGGTAC | | EVSNTRHLCLAPVNNAMTS | |
| | CAGCATCAACTACGTGGTCCTGCGACT | | IVMYLHEGPDSANYKKIAA | |
| | ACTGGGCCTGTCACGGGATCATCCGGT | | RWPEFLSLNPSGMFMNGTN | |
| | CTGCGTCAAGGCGCGCAAAACGCTGCT | | GLQVWDTAFAVQYACVCG | |
| | CACCAAGTTTGGCGGCGCCATCAACAA | | FAELPQYQKTIRAAFDFLDR | |
| | CCCCCATTGGGGCAAGACCTGGCTGTC | | SQINEPTEENSYRDDRVGG | |
| | GATTCTCAATCTCTACAAATGGGAGGG | | WPFSTKTQGYPVSDCTAEA | |
| | TGTGAATCCGGCCCCTGGCGAGCTCTG | | LKAIIMVQNTPGYEDLKKQ | |
| | GCTGTTGCCCTACTTTGTTCCTGTTCAT | | VSDKRKHTAIDLLLGMQNV | |
| | CCGGGCCGATGGTGGGTCCTTACCCGG | | GSFEPGSFASYEPIRASSML | |
| | TGGATCTACCTTGCCATGGGCTATCTG | | EKINPAEVFGNIMVEYPYV | |
| | GAGGCTGCGGAGGCCCAATGCGAACT | | ECTDSVVLGLSYFRKYHDY | |
| | CACTCCGTTGCTGGAGGAGCTCCGAGA | | RNEDVDRAISAAIGYIIREQ | |
| | CGAAATCTACAAAAAGCCCTACTCGGA | | QPDGGFFGSWGVCYCYAH | |
| | GATTGATTTCTCCAAACATTGCAACTC | | MFAMEALETQNLNYNNCS | |
| | CATCTCCGGAGTCGACCTCTACTATCC | | TVQKACDFLAGYQEADGG | |
| | CCACACCGGCCTTTTGAAGTTTGGCAA | | WAEDFKSCETQMYVRGPH | |
| | CGCGCTTCTCCGACGATACCGCAAGTT | | SLVVPTAMALLSLMSGRYP | |
| | CAGACCGCAGTGGATCAAAGAAAAGG | | QEDKIHAAARFLMSKQMS | |
| | TCAAGGAGGAAATTTACAACTTGTGCC | | NGEWLKEEMEGVFNHTCAI | |
| | TTCGAGAGGTTTCCAACACACGACACT | | EYPNYRFYFVMKALGLYF | |
| | TGTGTCTCGCTCCCGTCAACAATGCCA | | MGYCQ | |
| | TGACCTCCATTGTCATGTATCTCCATGA | | | |
| | GGGGCCCGATTCGGCGAATTACAAAA | | | |
| | AGATTGCGGCCCGATGGCCCGAATTTC | | | |
| | TGTCTCTGAATCCGTCGGGAATGTTTA | | | |
| | TGAACGGCACCAACGGTCTGCAGGTCT | | | |
| | GGGATACTGCGTTTGCCGTGCAATACG | | | |
| | CGTGTGTTTGTGGCTTTGCCGAACTTCC | | | |
| | CCAGTACCAGAAGACGATCCGAGCGG | | | |
| | CGTTTGATTTTCTCGATCGGTCCCAGAT | | | |
| | CAACGAGCCGACGGAGGAAAATTCCT | | | |
| | ATCGAGACGACCGCGTCGGAGGATGG | | | |
| | CCCTTTAGTACCAAGACCCAGGGGTAT | | | |
| | CCAGTCTCCGACTGTACTGCCGAGGCT | | | |
| | CTCAAGGCCATCATCATGGTCCAGAAT | | | |
| | ACGCCTGGATACGAGGATCTGAAGAA | | | |
| | ACAAGTGTCTGACAAGCGGAAACACA | | | |
| | CTGCCATCGATCTACTTTTGGGAATGC | | | |
| | AGAACGTGGGCTCGTTTGAACCGGGCT | | | |
| | CTTTCGCCTCCTATGAGCCTATCCGGG | | | |
| | CGTCGTCCATGCTGGAGAAGATCAATC | | | |
| | CGGCCGAGGTGTTTGGAAACATCATGG | | | |
| | TGGAGTATCCGTACGTGGAATGCACTG | | | |
| | ATTCTGTTGTTCTGGGTCTGTCCTACTT | | | |
| | TCGAAAGTACCACGATTACCGCAACGA | | | |
| | AGACGTGGACCGAGCCATCTCTGCTGC | | | |
| | CATTGGATACATTATTCGAGAGCAGCA | | | |
| | GCCTGACGGCGGCTTCTTTGGCTCCTG | | | |
| | GGGCGTGTGCTACTGCTACGCTCACAT | | | |
| | GTTTGCCATGGAGGCTCTGGAGACGCA | | | |
| | GAATCTCAACTATAACAACTGTTCCAC | | | |
| | GGTTCAAAAGGCGTGCGACTTTCTGGC | | | |
| | GGGCTACCAGGAAGCAGATGGAGGCT | | | |
| | GGGCCGAGGACTTTAAGTCGTGCGAGA | | | |
| | CTCAGATGTACGTGCGCGGACCCCATT | | | |
| | CGCTGGTCGTGCCTACTGCCATGGCCC | | | |
| | TGTTGAGTTTGATGAGTGGTCGGTATC | | | |
| | CCCAGGAGGACAAGATTCATGCTGCGG | | | |
| | CCCGGTTTCTCATGAGCAAGCAGATGA | | | |
| | GCAACGGTGAGTGGCTCAAGGAGGAG | | | |
| | ATGGAGGGGGTGTTTAACCATACTTGT | | | |
| | GCCATTGAGTATCCCAACTACCGGTTT | | | |
| | TATTTTGTCATGAAGGCTTTGGGGTTGT | | | |
| | ATTTCATGGGATATTGCCAGTGA | | | |
| 3B9b | ATGGGAATCCACGAAAGTGTGTCGAA | 107 | MGIHESVSKQFAKNGHSKY | 317 |
| | ACAGTTTGCGAAAAACGGACATTCCAA | | RSDRYGLPKTDLRRWTFHA | |
| | GTACCGCAGCGACCGATACGGCTTACC | | SDLGAQWWKYDDTTPLEE | |
| | TAAGACGGATCTGCGACGATGGACGTT | | LEKRATDYVKYSLELPGYA | |
| | CCACGCGTCCGATCTGGGGGCGCAATG | | PVTLDSKPVKNAYEAALKN | |
| | GTGGAAGTATGACGATACCACACCGCT | | WHLFASLQDPDSGAWQSE | |
| | GGAAGAGCTGGAAAAGAGGGCTACTG | | YDGPQFMSICYVTACYFGG | |
| | ACTACGTCAAATACTCGCTGGAGCTGC | | NEIPTPVKTEMIRYIVNTAH | |
| | CGGGATACGCGCCCGTGACTCTGGACT | | PVDGGWGLHKEDKSTCFG | |
| | CCAAGCCCGTGAAGAATGCCTACGAA | | TSINYVVLRLLGLSRDHPVC | |
| | GCGGCTCTCAAAAACTGGCATCTGTTT | | VKARKTLLTKFGGAINNPH | |
| | GCGTCGCTGCAAGACCCCGACTCCGGC | | WGKTWLSILNLYKWEGVN | |
| | GCATGGCAGTCGGAATACGACGGACC | | PAPGELWLLPYFVPVHPGR | |
| | GCAGTTCATGTCGATCTGTTATGTGAC | | WWVLTRWIYLAMGYLEAA | |
| | GGCGTGCTACTTTGGCGGCAACGAGAT | | EAQCELTPLLEELRDEIYKK | |
| | CCCCACGCCGGTCAAAACCGAAATGAT | | PYSEIDFSKHCNSISGVDLY | |
| | CAGATACATTGTCAACACAGCCCACCC | | YPHTGLLKFGNALLRRYRK | |
| | AGTTGACGGAGGCTGGGGCCTTCACAA | | FRPQWIKEKVKEEIYNLCLR | |
| | AGAAGACAAGAGCACCTGTTTCGGTAC | | EVSNTRHLCLAPVNNAMTS | |
| | CAGCATCAACTACGTGGTCCTGCGACT | | IVMYLHEGPDSANYKKIAA | |
| | ACTGGGCCTGTCACGGGATCATCCGGT | | RWPEFLSLNPSGMFMNGTN | |
| | CTGCGTCAAGGCGCGCAAAACGCTGCT | | GLQVWDTAFAVQYACVCG | |
| | CACCAAGTTTGGCGGCGCCATCAACAA | | FAELPQYQKTIRAAFDFLDL | |
| | CCCCCATTGGGGCAAGACCTGGCTGTC | | SQINEPTEENSYRDDRVGG | |
| | GATTCTCAATCTCTACAAATGGGAGGG | | WPFSTKTQGYPVSDCTAEA | |
| | TGTGAATCCGGCCCCTGGCGAGCTCTG | | LKAIIMVQNTPGYEDLKKQ | |
| | GCTGTTGCCCTACTTTGTTCCTGTTCAT | | VSDKRKHTAIDLLLGMQNV | |
| | CCGGGCCGATGGTGGGTCCTTACCCGG | | GSFEPGSFASYEPIRASSML | |
| | TGGATCTACCTTGCCATGGGCTATCTG | | EKINPAEVFGNIMVEYPYV | |
| | GAGGCTGCGGAGGCCCAATGCGAACT | | ECTDSVVLGLSYFRKYHDY | |
| | CACTCCGTTGCTGGAGGAGCTCCGAGA | | RNEDVDRAISAAIGYIIREQ | |
| | CGAAATCTACAAAAAGCCCTACTCGGA | | QPDGGFFGSWGVCYCYAH | |
| | GATTGATTTCTCCAAACATTGCAACTC | | MFAMEALETQNLNYNNCS | |
| | CATCTCCGGAGTCGACCTCTACTATCC | | TVQKACDFLAGYQEADGG | |
| | CCACACCGGCCTTTTGAAGTTTGGCAA | | WAEDFKSCETQMYVRGPH | |
| | CGCGCTTCTCCGACGATACCGCAAGTT | | SLVVPTAMALLSLMSGRYP | |
| | CAGACCGCAGTGGATCAAAGAAAAGG | | QEDKIHAAARFLMSKQMS | |
| | TCAAGGAGGAAATTTACAACTTGTGCC | | NGEWLKEEMEGVFNHTCAI | |
| | TTCGAGAGGTTTCCAACACACGACACT | | EYPNYRFYFVMKALGLYF | |
| | TGTGTCTCGCTCCCGTCAACAATGCCA | | MGYCQ | |
| | TGACCTCCATTGTCATGTATCTCCATGA | | | |
| | GGGGCCCGATTCGGCGAATTACAAAA | | | |
| | AGATTGCGGCCCGATGGCCCGAATTTC | | | |
| | TGTCTCTGAATCCGTCGGGAATGTTTA | | | |
| | TGAACGGCACCAACGGTCTGCAGGTCT | | | |
| | GGGATACTGCGTTTGCCGTGCAATACG | | | |
| | CGTGTGTTTGTGGCTTTGCCGAACTTCC | | | |
| | CCAGTACCAGAAGACGATCCGAGCGG | | | |
| | CGTTTGATTTTCTCGATCTGTCCCAGAT | | | |
| | CAACGAGCCGACGGAGGAAAATTCCT | | | |
| | ATCGAGACGACCGCGTCGGAGGATGG | | | |
| | CCCTTTAGTACCAAGACCCAGGGGTAT | | | |
| | CCAGTCTCCGACTGTACTGCCGAGGCT | | | |
| | CTCAAGGCCATCATCATGGTCCAGAAT | | | |
| | ACGCCTGGATACGAGGATCTGAAGAA | | | |
| | ACAAGTGTCTGACAAGCGGAAACACA | | | |
| | CTGCCATCGATCTACTTTTGGGAATGC | | | |
| | AGAACGTGGGCTCGTTTGAACCGGGCT | | | |
| | CTTTCGCCTCCTATGAGCCTATCCGGG | | | |
| | CGTCGTCCATGCTGGAGAAGATCAATC | | | |
| | CGGCCGAGGTGTTTGGAAACATCATGG | | | |
| | TGGAGTATCCGTACGTTGAATGCACTG | | | |
| | ATTCTGTTGTTCTGGGTCTGTCCTACTT | | | |
| | TCGAAAGTACCACGATTACCGCAACGA | | | |
| | AGACGTGGACCGAGCCATCTCTGCTGC | | | |
| | CATTGGATACATTATTCGAGAGCAGCA | | | |
| | GCCTGACGGCGGCTTCTTTGGCTCCTG | | | |
| | GGGCGTGTGCTACTGCTACGCTCACAT | | | |
| | GTTTGCCATGGAGGCTCTGGAGACGCA | | | |
| | GAATCTCAACTATAACAACTGTTCCAC | | | |
| | GGTTCAAAAGGCGTGCGACTTTCTGGC | | | |
| | GGGCTACCAGGAAGCAGATGGAGGCT | | | |
| | GGGCCGAGGACTTTAAGTCGTGCGAGA | | | |
| | CTCAGATGTACGTGCGCGGACCCCATT | | | |
| | CGCTGGTCGTGCCTACTGCCATGGCCC | | | |
| | TGTTGAGTTTGATGAGTGGTCGGTATC | | | |
| | CCCAGGAGGACAAGATTCATGCTGCGG | | | |
| | CCCGGTTTCTCATGAGCAAGCAGATGA | | | |
| | GCAACGGTGAGTGGCTCAAGGAGGAG | | | |
| | ATGGAGGGGGTGTTTAACCATACTTGT | | | |
| | GCCATTGAGTATCCCAACTACCGGTTT | | | |
| | TATTTTGTCATGAAGGCTTTGGGGTTGT | | | |
| | ATTTCATGGGATATTGCCAGTGA | | | |
| 3C9 | ATGGGAATCCACGAAAGTGTGTCGAA | 108 | MGIHESVSKQFAKNGHSKY | 318 |
| | ACAGTTTGCGAAAAACGGACATTCCAA | | RSDRYGLPKTDLRRWTFHA | |
| | GTACCGCAGCGACCGATACGGCTTACC | | SDLGAQWWKYDDTTPLEE | |
| | TAAGACGGATCTGCGACGATGGACGTT | | LEKRATDYVKYSLELPGYA | |
| | CCACGCGTCCGATCTGGGGGCGCAATG | | PVTLDSKPVKNAYEAALKN | |
| | GTGGAAGTATGACGATACCACACCGCT | | WHLFASLQDPDSGAWQSE | |
| | GGAAGAGCTGGAAAAGAGGGCTACCG | | YDGPQFMSIGYVTACYFGG | |
| | ACTACGTCAAATACTCGCTGGAGCTGC | | NEIPTPVKTEMIRYIVNTAH | |
| | CGGGATACGCGCCCGTGACTCTGGACT | | PVDGGWGLHKEDKSTCFG | |
| | CCAAGCCCGTGAAAAATGCCTACGAA | | TSINYVVLRLLGLSRDHPVC | |
| | GCGGCTCTCAAAAACTGGCATCTGTTT | | VKARKTLLTKFGGAINNPH | |
| | GCGTCGCTGCAAGACCCCGACTCCGGC | | WGKTWLSILNLYKWEGVN | |
| | GCATGGCAGTCGGAATACGACGGACC | | LAPGELWLLPYFVPVHPGR | |
| | GCAGTTCATGTCGATCGGTTATGTGAC | | WWVHTRWIYLAMGYLEA | |
| | GGCGTGCTACTTTGGCGGCAACGAGAT | | AEAQCELTPLLEELRDEIYK | |
| | CCCCACGCCGGTCAAAACCGAAATGAT | | KPYSEIDFSKHCNSISGVDL | |
| | CAGATACATTGTCAACACAGCCCACCC | | YYPHTGLLKFGNALLRRYR | |
| | AGTTGACGGAGGCTGGGGCCTTCACAA | | KFRPQWIKEKVKEEIYNLC | |
| | AGAAGACAAGAGCACCTGTTTCGGTAC | | LREVSNTRHLCLAPVNNAM | |
| | CAGCATCAACTACGTGGTCCTGCGACT | | TSIVMYLHEGPDSANYKKI | |
| | ACTGGGCCTGTCACGGGATCATCCGGT | | AARWPEFLSLNPSGMFMN | |
| | CTGCGTCAAGGCGCGCAAAACGCTGCT | | GTNGLQVWDTAFAVQYAC | |
| | CACCAAGTTTGGCGGCGCTATCAACAA | | VCGFAELPQYQKTIRAAFD | |
| | CCCCCATTGGGGCAAGACCTGGCTGTC | | FLDRSQINEPTEENSYRDDR | |
| | GATTCTCAATCTCTACAAATGGGAGGG | | VGGWPFSTKTQGYPVSDCT | |
| | TGTGAATCTGGCCCCTGGCGAGCTCTG | | AVALKAIIMVQNTPGYEDL | |
| | GCTGTTGCCCTACTTTGTTCCTGTTCAT | | KKQVSDKRKHTAIDLLLGM | |
| | CCGGGCCGATGGTGGGTCCATACCCGG | | QNVGSFEPGSFASYEPIRAS | |
| | TGGATCTACCTTGCCATGGGCTATCTG | | SMLEKINPAEVFGNIMVEY | |
| | GAGGCTGCGGAGGCCCAATGCGAACT | | PYVECTDSVALGLSNFRKY | |
| | CACTCCGTTGCTGGAGGAGCTCCGAGA | | HDYRNEDVDRAISAAIGYII | |
| | CGAAATCTACAAAAAGCCCTACTCGGA | | REQQPDGGFFGSWGVCYC | |
| | GATTGATTTCTCCAAACATTGCAACTC | | YAHMFAMEALETQNLNYN | |
| | CATCTCCGGAGTCGACCTCTACTATCC | | NCSTVQKACDFLAGYQEA | |
| | CCACACCGGCCTTTTGAAGTTTGGCAA | | DGGWAEDFKSCETQMYVR | |
| | CGCGCTTCTCCGACGATACCGCAAGTT | | GPHSLVVPTAMALLSLMSG | |
| | CAGACCGCAGTGGATCAAAGAAAAGG | | RYPQEDKIHAAARFLMSKQ | |
| | TCAAGGAGGAAATTTACAACTTGTGCC | | MSNGEWLKEEMEGVFNHT | |
| | TTCGAGAGGTTTCCAACACACGACACT | | CAIEYPNYRFYFVMKALGL | |
| | TGTGTCTCGCTCCCGTCAACAATGCCA | | YFKGYCQ | |
| | TGACCTCCATTGTCATGTATCTCCATGA | | | |
| | GGGGCCCGATTCGGCGAATTACAAAA | | | |
| | AGATTGCGGCCCGATGGCCCGAATTTC | | | |
| | TGTCTCTGAATCCGTCGGGAATGTTTA | | | |
| | TGAACGGCACCAACGGTCTGCAGGTCT | | | |
| | GGGATACTGCGTTTGCCGTGCAATACG | | | |
| | CGTGTGTTTGTGGCTTTGCCGAACTTCC | | | |
| | CCAGTACCAGAAGACGATCCGAGCGG | | | |
| | CGTTTGATTTTCTCGATCGGTCCCAGAT | | | |
| | CAACGAGCCGACGGAAGAAAATTCCT | | | |
| | ATCGAGACGACCGCGTCGGAGGATGG | | | |
| | CCCTTTAGTACCAAGACCCAGGGGTAT | | | |
| | CCAGTCTCCGACTGTACTGCCGTGGCT | | | |
| | CTCAAGGCCATCATCATGGTCCAGAAT | | | |
| | ACGCCTGGATACGAGGATCTGAAGAA | | | |
| | ACAAGTGTCTGACAAGCGGAAACACA | | | |
| | CTGCCATCGATCTACTTTTGGGAATGC | | | |
| | AGAACGTGGGCTCGTTTGAACCGGGCT | | | |
| | CTTTCGCCTCCTATGAGCCTATCCGGG | | | |
| | CGTCGTCCATGCTGGAGAAGATCAATC | | | |
| | CGGCCGAGGTGTTTGGAAACATCATGG | | | |
| | TGGAGTATCCGTACGTGGAATGCACTG | | | |
| | ATTCTGTTGCTCTGGGTCTGTCCAACTT | | | |
| | TCGAAAGTACCACGATTACCGCAACGA | | | |
| | AGACGTGGACCGAGCCATCTCTGCTGC | | | |
| | CATTGGATACATTATTCGAGAGCAGCA | | | |
| | GCCTGACGGCGGCTTCTTTGGCTCCTG | | | |
| | GGGCGTGTGCTACTGCTACGCTCACAT | | | |
| | GTTTGCCATGGAGGCTCTGGAGACGCA | | | |
| | GAATCTCAACTATAACAACTGTTCCAC | | | |
| | GGTTCAAAAGGCGTGCGACTTTCTGGC | | | |
| | GGGCTACCAGGAAGCAGATGGAGGCT | | | |
| | GGGCCGAGGACTTTAAGTCGTGCGAGA | | | |
| | CTCAGATGTACGTGCGCGGACCCCATT | | | |
| | CGCTGGTCGTGCCTACTGCCATGGCCC | | | |
| | TGTTGAGTTTGATGAGTGGTCGGTATC | | | |
| | CCCAGGAGGACAAGATTCATGCTGCGG | | | |
| | CCCGGTTTCTCATGAGCAAGCAGATGA | | | |
| | GCAACGGTGAGTGGCTCAAGGAGGAG | | | |
| | ATGGAGGGGGTGTTTAACCATACTTGT | | | |
| | GCCATTGAGTATCCCAACTACCGGTTT | | | |
| | TATTTTGTCATGAAGGCTTTGGGGTTGT | | | |
| | ATTTCAAGGGATATTGCCAGTGA | | | |
| 4A6 | ATGGGAATCCACGAAAGTGTGTCGAA | 109 | MGIHESVSKQFAKNGHSKY | 319 |
| | ACAGTTTGCGAAAAACGGACATTCCAA | | RSDRYGLPKTDLRRWTFHA | |
| | GTACCGCAGCGACCGATACGGCTTACC | | SDLGAQWWKYDDTTPLEE | |
| | TAAGACGGATCTGCGACGATGGACGTT | | LEKRATDYVKYSLELPGYA | |
| | CCACGCGTCCGATCTGGGGGCGCAATG | | PVTLDSKPVKNAYEAALKN | |
| | GTGGAAGTATGACGATACCACACCGCT | | WHLFASLQDPDSDAWQSE | |
| | GGAAGAGCTGGAAAAGAGGGCTACCG | | YDGPQFMSIGYVTACYFGG | |
| | ACTACGTCAAATACTCGCTGGAGCTGC | | NEIPTPVKTEMIRYIVNTAH | |
| | CGGGATACGCGCCCGTGACTCTGGACT | | PVDGGWGLHKEDKSTCFG | |
| | CCAAGCCCGTGAAAAATGCCTACGAA | | TSINYVVLRLLGLSRDHPVC | |
| | GCGGCTCTCAAAAACTGGCATCTGTTT | | VKARKTLLTKFGGAINNPH | |
| | GCGTCGCTGCAAGACCCCGACTCCGAC | | WGKTWLSILNLYKWEGVN | |
| | GCATGGCAGTCGGAATACGACGGACC | | PAPGELWLLPYFVPVHPGR | |
| | GCAGTTCATGTCGATCGGTTATGTGAC | | WWVHTRWIYLAMGYLEA | |
| | GGCGTGCTACTTTGGCGGCAACGAGAT | | AEAQCELTPLLEELRDEIYK | |
| | CCCCACGCCGGTCAAAACCGAAATGAT | | KPYSEIDFSKHCNSISGVDL | |
| | CAGATACATTGTCAACACAGCCCACCC | | YYPHTGLLKFGNALLRRYR | |
| | AGTTGACGGAGGCTGGGGCCTTCACAA | | KFRPQWIKEKVKEEIYNLC | |
| | AGAAGACAAGAGCACCTGTTTCGGTAC | | LREVSNTRHLCLAPVNNAM | |
| | CAGCATCAACTACGTGGTCCTGCGACT | | TSIVMYLHEGPDSANYKKI | |
| | ACTGGGCCTGTCACGGGATCATCCGGT | | AARWPEFLSLNPSGMFMN | |
| | CTGCGTCAAGGCGCGCAAAACGCTGCT | | GTNGLQVWDTAFAVQYAC | |
| | CACCAAGTTTGGCGGCGCCATCAACAA | | VCGFAELPQYQKTIRAAFD | |
| | CCCCCATTGGGGCAAGACCTGGCTGTC | | FLDRSQINEPTEENSYRDDR | |
| | GATTCTCAATCTCTACAAATGGGAGGG | | VGGWPFSTKTQGYPVSDCT | |
| | TGTGAATCCGGCCCCTGGCGAGCTCTG | | AEALKAIIMVQNTPGYEDL | |
| | GCTGTTGCCCTACTTTGTTCCTGTTCAT | | KKQVSDKRKHTAIDLLLGM | |
| | CCGGGCCGATGGTGGGTCCATACCCGG | | QNVGSFEPGSFASYEPIRAS | |
| | TGGATCTACCTTGCCATGGGCTATCTG | | SMLEKINPAEVFGNIMVEY | |
| | GAGGCTGCGGAGGCCCAATGCGAACT | | PYVECTDSVVLGLSYFRKY | |
| | CACTCCGTTGCTGGAGGAGCTCCGAGA | | HDYRNEDVDRAISAAIGYII | |
| | CGAAATCTACAAAAAGCCCTACTCGGA | | REQQPDGGFFGSWGVCYC | |
| | GATTGATTTCTCCAAACATTGCAACTC | | YAHMFAMEALETQNLNYN | |
| | CATCTCCGGAGTCGACCTCTACTATCC | | NCSTVQEACDFLAGYQEAD | |
| | CCACACCGGCCTTTTGAAGTTTGGCAA | | GGWAEDFKSCETQMYVRG | |
| | CGCGCTTCTCCGACGATACCGCAAGTT | | PHSLVVPTAMALLSLMSGR | |
| | CAGACCGCAGTGGATCAAAGAAAAGG | | YPQEDKIHAAARFLMSKQ | |
| | TCAAGGAGGAAATTTACAACTTGTGCC | | MSNGEWLKEEMEGVFNHT | |
| | TTCGAGAGGTTTCCAACACACGACACT | | CAIEYPNYRFYFVMKALGL | |
| | TGTGTCTCGCTCCCGTCAACAATGCCA | | YFKGYCQ | |
| | TGACCTCCATTGTCATGTATCTCCATGA | | | |
| | GGGGCCCGATTCGGCGAATTACAAAA | | | |
| | AGATTGCGGCCCGATGGCCCGAATTTC | | | |
| | TGTCTCTGAATCCGTCGGGAATGTTTA | | | |
| | TGAACGGCACCAACGGTCTGCAGGTCT | | | |
| | GGGATACTGCGTTTGCCGTGCAATACG | | | |
| | CGTGTGTTTGTGGCTTTGCCGAACTTCC | | | |
| | CCAGTACCAGAAGACGATCCGAGCGG | | | |
| | CGTTTGATTTTCTCGATCGGTCCCAGAT | | | |
| | CAACGAGCCGACGGAGGAAAATTCCT | | | |
| | ATCGAGACGACCGCGTCGGAGGATGG | | | |
| | CCCTTTAGTACCAAGACCCAGGGGTAT | | | |
| | CCAGTCTCCGACTGTACTGCCGAGGCT | | | |
| | CTCAAGGCCATCATCATGGTCCAGAAT | | | |
| | ACGCCTGGATACGAGGATCTGAAGAA | | | |
| | ACAAGTGTCTGACAAGCGGAAACACA | | | |
| | CTGCCATCGATCTACTTTTGGGAATGC | | | |
| | AGAACGTGGGCTCGTTTGAACCGGGCT | | | |
| | CTTTCGCCTCCTATGAGCCTATCCGGG | | | |
| | CGTCGTCCATGCTGGAGAAGATCAATC | | | |
| | CGGCCGAGGTGTTTGGAAACATCATGG | | | |
| | TGGAGTATCCGTACGTGGAATGCACTG | | | |
| | ATTCTGTTGTTCTGGGTCTGTCCTACTT | | | |
| | TCGAAAGTACCACGATTACCGCAACGA | | | |
| | AGACGTGGACCGAGCCATCTCTGCTGC | | | |
| | CATTGGATACATTATTCGAGAGCAGCA | | | |
| | GCCTGACGGCGGCTTCTTTGGCTCCTG | | | |
| | GGGCGTGTGCTACTGCTACGCTCACAT | | | |
| | GTTTGCCATGGAGGCTCTGGAGACGCA | | | |
| | GAATCTCAACTATAACAACTGTTCCAC | | | |
| | GGTTCAAGAGGCGTGCGACTTTCTGGC | | | |
| | GGGCTACCAGGAAGCAGATGGAGGCT | | | |
| | GGGCCGAGGACTTTAAGTCGTGCGAGA | | | |
| | CTCAGATGTACGTGCGCGGACCCCATT | | | |
| | CGCTGGTCGTGCCTACTGCCATGGCCC | | | |
| | TGTTGAGTTTGATGAGTGGTCGGTATC | | | |
| | CCCAGGAGGACAAGATTCATGCTGCGG | | | |
| | CCCGGTTTCTCATGAGCAAGCAGATGA | | | |
| | GCAACGGTGAGTGGCTCAAGGAGGAG | | | |
| | ATGGAGGGGGTGTTTAACCATACTTGT | | | |
| | GCCATTGAGTATCCCAACTACCGGTTT | | | |
| | TATTTTGTCATGAAGGCTTTGGGGTTGT | | | |
| | ATTTCAAGGGATATTGCCAGTGA | | | |
| 4F11 | ATGGGAATCCACGAAAGTGTGTCGAA | 109 | MGIHESVSKQFAKNGHSKY | 319 |
| | ACAGTTTGCGAAAAACGGACATTCCAA | | RSDRYGLPKTDLRRWTFHA | |
| | GTACCGCAGCGACCGATACGGCTTACC | | SDLGAQWWKYDDTTPLEE | |
| | TAAGACGGATCTGCGACGATGGACGTT | | LEKRATDYVKYSLELPGYA | |
| | CCACGCGTCCGATCTGGGGGCGCAATG | | PVTLDSKPVKNAYEAALKN | |
| | GTGGAAGTATGACGATACCACACCGCT | | WHLFASLQDPDSDAWQSE | |
| | GGAAGAGCTGGAAAAGAGGGCTACCG | | YDGPQFMSIGYVTACYFGG | |
| | ACTACGTCAAATACTCGCTGGAGCTGC | | NEIPTPVKTEMIRYIVNTAH | |
| | CGGGATACGCGCCCGTGACTCTGGACT | | PVDGGWGLHKEDKSTCFG | |
| | CCAAGCCCGTGAAAAATGCCTACGAA | | TSINYVVLRLLGLSRDHPVC | |
| | GCGGCTCTCAAAAACTGGCATCTGTTT | | VKARKTLLTKFGGAINNPH | |
| | GCGTCGCTGCAAGACCCCGACTCCGAC | | WGKTWLSILNLYKWEGVN | |
| | GCATGGCAGTCGGAATACGACGGACC | | PAPGELWLLPYFVPVHPGR | |
| | GCAGTTCATGTCGATCGGTTATGTGAC | | WWVHTRWIYLAMGYLEA | |
| | GGCGTGCTACTTTGGCGGCAACGAGAT | | AEAQCELTPLLEELRDEIYK | |
| | CCCCACGCCGGTCAAAACCGAAATGAT | | KPYSEIDFSKHCNSISGVDL | |
| | CAGATACATTGTCAACACAGCCCACCC | | YYPHTGLLKFGNALLRRYR | |
| | AGTTGACGGAGGCTGGGGCCTTCACAA | | KFRPQWIKEKVKEEIYNLC | |
| | AGAAGACAAGAGCACCTGTTTCGGTAC | | LREVSNTRHLCLAPVNNAM | |
| | CAGCATCAACTACGTGGTCCTGCGACT | | TSIVMYLHEGPDSANYKKI | |
| | ACTGGGCCTGTCACGGGATCATCCGGT | | AARWPEFLSLNPSGMFMN | |
| | CTGCGTCAAGGCGCGCAAAACGCTGCT | | GTNGLQVWDTAFAVQYAC | |
| | CACCAAGTTTGGCGGCGCCATCAACAA | | VCGFAELPQYQKTIRAAFD | |
| | CCCCCATTGGGGCAAGACCTGGCTGTC | | FLDRSQINEPTEENSYRDDR | |
| | GATTCTCAATCTCTACAAATGGGAGGG | | VGGWPFSTKTQGYPVSDCT | |
| | TGTGAATCCGGCCCCTGGCGAGCTCTG | | AEALKAIIMVQNTPGYEDL | |
| | GCTGTTGCCCTACTTTGTTCCTGTTCAT | | KKQVSDKRKHTAIDLLLGM | |
| | CCGGGCCGATGGTGGGTCCATACCCGG | | QNVGSFEPGSFASYEPIRAS | |
| | TGGATCTACCTTGCCATGGGCTATCTG | | SMLEKINPAEVFGNIMVEY | |
| | GAGGCTGCGGAGGCCCAATGCGAACT | | PYVECTDSVVLGLSYFRKY | |
| | CACTCCGTTGCTGGAGGAGCTCCGAGA | | HDYRNEDVDRAISAAIGYII | |
| | CGAAATCTACAAAAAGCCCTACTCGGA | | REQQPDGGFFGSWGVCYC | |
| | GATTGATTTCTCCAAACATTGCAACTC | | YAHMFAMEALETQNLNYN | |
| | CATCTCCGGAGTCGACCTCTACTATCC | | NCSTVQEACDFLAGYQEAD | |
| | CCACACCGGCCTTTTGAAGTTTGGCAA | | GGWAEDFKSCETQMYVRG | |
| | CGCGCTTCTCCGACGATACCGCAAGTT | | PHSLVVPTAMALLSLMSGR | |
| | CAGACCGCAGTGGATCAAAGAAAAGG | | YPQEDKIHAAARFLMSKQ | |
| | TCAAGGAGGAAATTTACAACTTGTGCC | | MSNGEWLKEEMEGVFNHT | |
| | TTCGAGAGGTTTCCAACACACGACACT | | CAIEYPNYRFYFVMKALGL | |
| | TGTGTCTCGCTCCCGTCAACAATGCCA | | YFKGYCQ | |
| | TGACCTCCATTGTCATGTATCTCCATGA | | | |
| | GGGGCCCGATTCGGCGAATTACAAAA | | | |
| | AGATTGCGGCCCGATGGCCCGAATTTC | | | |
| | TGTCTCTGAATCCGTCGGGAATGTTTA | | | |
| | TGAACGGCACCAACGGTCTGCAGGTCT | | | |
| | GGGATACTGCGTTTGCCGTGCAATACG | | | |
| | CGTGTGTTTGTGGCTTTGCCGAACTTCC | | | |
| | CCAGTACCAGAAGACGATCCGAGCGG | | | |
| | CGTTTGATTTTCTCGATCGGTCCCAGAT | | | |
| | CAACGAGCCGACGGAGGAAAATTCCT | | | |
| | ATCGAGACGACCGCGTCGGAGGATGG | | | |
| | CCCTTTAGTACCAAGACCCAGGGGTAT | | | |
| | CCAGTCTCCGACTGTACTGCCGAGGCT | | | |
| | CTCAAGGCCATCATCATGGTCCAGAAT | | | |
| | ACGCCTGGATACGAGGATCTGAAGAA | | | |
| | ACAAGTGTCTGACAAGCGGAAACACA | | | |
| | CTGCCATCGATCTACTTTTGGGAATGC | | | |
| | AGAACGTGGGCTCGTTTGAACCGGGCT | | | |
| | CTTTCGCCTCCTATGAGCCTATCCGGG | | | |
| | CGTCGTCCATGCTGGAGAAGATCAATC | | | |
| | CGGCCGAGGTGTTTGGAAACATCATGG | | | |
| | TGGAGTATCCGTACGTGGAATGCACTG | | | |
| | ATTCTGTTGTTCTGGGTCTGTCCTACTT | | | |
| | TCGAAAGTACCACGATTACCGCAACGA | | | |
| | AGACGTGGACCGAGCCATCTCTGCTGC | | | |
| | CATTGGATACATTATTCGAGAGCAGCA | | | |
| | GCCTGACGGCGGCTTCTTTGGCTCCTG | | | |
| | GGGCGTGTGCTACTGCTACGCTCACAT | | | |
| | GTTTGCCATGGAGGCTCTGGAGACGCA | | | |
| | GAATCTCAACTATAACAACTGTTCCAC | | | |
| | GGTTCAAGAGGCGTGCGACTTTCTGGC | | | |
| | GGGCTACCAGGAAGCAGATGGAGGCT | | | |
| | GGGCCGAGGACTTTAAGTCGTGCGAGA | | | |
| | CTCAGATGTACGTGCGCGGACCCCATT | | | |
| | CGCTGGTCGTGCCTACTGCCATGGCCC | | | |
| | TGTTGAGTTTGATGAGTGGTCGGTATC | | | |
| | CCCAGGAGGACAAGATTCATGCTGCGG | | | |
| | CCCGGTTTCTCATGAGCAAGCAGATGA | | | |
| | GCAACGGTGAGTGGCTCAAGGAGGAG | | | |
| | ATGGAGGGGGTGTTTAACCATACTTGT | | | |
| | GCCATTGAGTATCCCAACTACCGGTTT | | | |
| | TATTTTGTCATGAAGGCTTTGGGGTTGT | | | |
| | ATTTCAAGGGATATTGCCAGTGA | | | |
| 3D11 | ATGGGAATCCACGAAAGTGTGTCGAA | 111 | MGIHESVSKQFAKNGHSKY | 321 |
| | ACAGTTTGCGAAAAACGGACATTCCAA | | RSDRYGLPKTDLRRWTFHA | |
| | GTACCGCAGCGACCGATACGGCTTACC | | SDLGAQWWKYDDTTPLEE | |
| | TAAGACGGATCTGCGACGATGGACGTT | | LEKRATDYVKYSLELPGYA | |
| | CCACGCGTCCGATCTGGGGGCGCAATG | | PVTLDSKPVNNAYEAALKN | |
| | GTGGAAGTATGACGATACCACACCGCT | | WHLFASLQDPDSGAWQSE | |
| | GGAAGAGCTGGAAAAGAGGGCTACCG | | YDGPQFMSIGYVTACYFGG | |
| | ACTACGTCAAATACTCGCTGGAGCTGC | | NEIPTPVKTEMIRYIVNTAH | |
| | CGGGATACGCGCCCGTGACTCTGGACT | | PVDGGWSLHKEDKSTCFGT | |
| | CCAAGCCCGTGAATAATGCCTACGAAG | | SINYVVLRLLGLSRDHPVC | |
| | CGGCTCTCAAAAACTGGCATCTGTTTG | | VKARKTLLTKFGGAINNPH | |
| | CGTCGCTGCAAGACCCCGACTCCGGCG | | WGKTWLSILNLYKWEGVN | |
| | CATGGCAGTCGGAATACGACGGACCG | | PAPGELWLLPYFVPVHPGR | |
| | CAGTTCATGTCGATCGGTTATGTGACG | | WWVHTRWIYLAMGYLEA | |
| | GCATGCTACTTTGGCGGCAACGAGATC | | AEAQCELTPLLEELRDEIYK | |
| | CCCACGCCGGTCAAAACCGAAATGATC | | KPYSEIDFSKHCNSISGVDL | |
| | AGATACATTGTCAACACAGCCCACCCA | | YYPHTGLLKFGNALLRRYR | |
| | GTTGACGGAGGCTGGAGCCTTCACAAA | | KFRPQWIKEKVKEEIYNLC | |
| | GAAGACAAGAGCACCTGTTTCGGTACC | | LREVSNTRHLCLAPVNNAM | |
| | AGCATCAACTACGTGGTCCTGCGACTA | | TSIVMYLHEGPDSANYKKI | |
| | CTGGGCCTGTCACGGGATCATCCGGTC | | AARWPEFLSLNPSGMFMN | |
| | TGCGTCAAGGCGCGCAAAACGCTGCTC | | GTNGLQVWDTAFAVQYAC | |
| | ACCAAGTTTGGCGGCGCCATCAACAAC | | VCGFAELPQYQKTIRAAFD | |
| | CCCCATTGGGGCAAGACCTGGCTGTCG | | FLDRSQINEPTEENSYRDDR | |
| | ATTCTCAATCTCTACAAATGGGAGGGT | | VGGWPFSTKTQGYPVSDCT | |
| | GTGAATCCGGCCCCTGGCGAGCTCTGG | | AEALKAIIMVQNTPGYEDL | |
| | CTGTTGCCCTACTTTGTTCCTGTTCATC | | KKQVSDKRKHTAIDLLLGM | |
| | CGGGCCGATGGTGGGTCCATACCCGGT | | QNVGLFEPGSFASYETIRAS | |
| | GGATCTACCTTGCCATGGGCTATCTGG | | SMLEKINPAEVFGNIMVEY | |
| | AGGCTGCGGAGGCCCAATGCGAACTC | | PYVECTDSVVLGLSYFRKY | |
| | ACTCCGTTGCTGGAGGAGCTCCGAGAC | | HDYRNEDVDRAISAAIGYII | |
| | GAAATCTACAAAAAGCCCTACTCGGAG | | REQQPDGGFFGSWGVCYC | |
| | ATTGATTTCTCCAAACATTGCAACTCC | | YAHMFAMEALETLNLNYN | |
| | ATCTCCGGAGTCGACCTCTACTATCCC | | NCSTVQKACDFLAGYQEA | |
| | CACACCGGCCTTTTGAAGTTTGGCAAC | | DGGWAEDFKSCETQMYVR | |
| | GCGCTTCTCCGACGATACCGCAAGTTC | | GPHSLVVPTAMALLSLMSG | |
| | AGACCGCAGTGGATCAAAGAAAAGGT | | RYPQEDKIHAAARFLMSKQ | |
| | CAAGGAGGAAATTTACAACTTGTGCCT | | MSNGEWLKEEMEGVFNHT | |
| | TCGAGAGGTTTCCAACACACGACACTT | | CAIEYPNYRFYFVMKALGL | |
| | GTGTCTCGCTCCCGTCAACAATGCCAT | | YFKGYC | |
| | GACCTCCATTGTCATGTATCTCCATGA | | | |
| | GGGGCCCGATTCGGCGAATTACAAAA | | | |
| | AGATTGCGGCCCGATGGCCCGAATTTC | | | |
| | TGTCTCTGAATCCGTCGGGAATGTTTA | | | |
| | TGAACGGCACCAACGGTCTGCAGGTCT | | | |
| | GGGATACTGCGTTTGCCGTGCAATACG | | | |
| | CGTGTGTTTGTGGCTTTGCCGAACTTCC | | | |
| | CCAGTACCAGAAGACGATCCGAGCGG | | | |
| | CGTTTGATTTTCTCGATCGGTCCCAGAT | | | |
| | CAACGAGCCGACGGAGGAAAATTCCT | | | |
| | ATCGAGACGACCGCGTCGGAGGATGG | | | |
| | CCCTTTAGTACCAAGACCCAGGGGTAT | | | |
| | CCAGTCTCCGACTGTACTGCCGAGGCT | | | |
| | CTCAAGGCCATCATCATGGTCCAGAAT | | | |
| | ACGCCTGGATACGAGGATCTGAAGAA | | | |
| | ACAAGTGTCTGACAAGCGGAAACACA | | | |
| | CTGCCATCGATCTACTTTTGGGAATGC | | | |
| | AGAACGTGGGCTTGTTTGAACCGGGCT | | | |
| | CTTTCGCCTCCTATGAGACTATCCGGG | | | |
| | CGTCGTCCATGCTGGAGAAGATCAATC | | | |
| | CGGCCGAGGTGTTTGGAAACATCATGG | | | |
| | TGGAGTATCCGTACGTGGAATGCACTG | | | |
| | ATTCTGTTGTTCTGGGTCTGTCCTACTT | | | |
| | TCGAAAGTACCACGATTACCGCAACGA | | | |
| | AGACGTGGACCGAGCCATCTCTGCTGC | | | |
| | CATTGGATACATTATTCGAGAGCAGCA | | | |
| | GCCTGACGGCGGCTTCTTTGGCTCCTG | | | |
| | GGGCGTGTGCTACTGCTACGCTCACAT | | | |
| | GTTTGCCATGGAGGCTCTGGAGACGCT | | | |
| | GAATCTCAACTATAACAACTGTTCCAC | | | |
| | GGTTCAAAAGGCGTGCGACTTTCTGGC | | | |
| | GGGCTACCAGGAAGCAGATGGAGGCT | | | |
| | GGGCCGAGGACTTTAAGTCGTGCGAGA | | | |
| | CTCAGATGTACGTGCGCGGACCCCATT | | | |
| | CGCTGGTCGTGCCTACTGCCATGGCCC | | | |
| | TGTTGAGTTTGATGAGTGGTCGGTATC | | | |
| | CCCAGGAGGACAAGATTCATGCTGCGG | | | |
| | CCCGGTTTCTCATGAGCAAGCAGATGA | | | |
| | GCAACGGTGAGTGGCTCAAGGAGGAG | | | |
| | ATGGAGGGGGTGTTTAACCATACTTGT | | | |
| | GCCATTGAGTATCCCAACTACCGGTTT | | | |
| | TATTTTGTCATGAAGGCTTTGGGGTTGT | | | |
| | ATTTCAAGGGATATTGCTAG | | | |
| 4B11 | ATGGGAATCCACGAAAGTGTGTCGAA | 112 | MGIHESVSKQFAKNGHSKY | 322 |
| | ACAGTTTGCGAAAAACGGACATTCCAA | | RSDRYGLPKTDLRRWTFHA | |
| | GTACCGCAGCGACCGATACGGCTTACC | | SDLGAQWWKYDDTTPLEE | |
| | TAAGACGGATCTGCGACGATGGACGTT | | LEKRATDYVKYSLELPGYA | |
| | CCACGCGTCCGATCTGGGGGCGCAATG | | PVTLDSKPVKNAYEAALKN | |
| | GTGGAAGTATGACGATACCACACCGCT | | WHLFASLQDPDSGAWQSE | |
| | GGAAGAGCTGGAAAAGAGGGCTACCG | | YDGPQFMSIGYVTACYFGG | |
| | ACTACGTCAAATACTCGCTGGAGCTGC | | NEIPTPVKTEMIRYIVNTAH | |
| | CGGGATACGCGCCCGTGACTCTGGACT | | PVDGGWGLHKEDKSTCFG | |
| | CCAAGCCCGTGAAAAATGCCTACGAA | | TSINYVVLRLLGLSRDHPVC | |
| | GCGGCTCTCAAAAACTGGCATCTGTTT | | VKARKTLLTKFGGAINNPH | |
| | GCGTCGCTGCAAGACCCCGACTCCGGC | | WGKILLSILNLYKWEGVNP | |
| | GCATGGCAGTCGGAATACGACGGACC | | APGELWLLPYFVPVHPGRW | |
| | GCAGTTCATGTCGATCGGTTATGTGAC | | WVHTRWIYLAMGYLEAAE | |
| | GGCATGCTACTTTGGCGGCAACGAGAT | | AQCELTPLLEELRDEIYKKP | |
| | CCCCACGCCGGTCAAAACTGAAATGAT | | YSEIDFSKHCNSISGVDLYY | |
| | CAGATACATTGTCAACACAGCCCACCC | | PHTGLLKFGNALLRRYRKF | |
| | AGTTGACGGAGGCTGGGGCCTTCACAA | | RPQWIKEKVKEEIYNLCLR | |
| | AGAAGACAAGAGCACCTGTTTCGGTAC | | EVSNTRHLCLAPVNNAMTS | |
| | CAGCATCAACTACGTGGTCCTGCGACT | | IVMYLHEGPDSANYKKIAA | |
| | ACTGGGCCTGTCACGGGATCATCCGGT | | RWPEFLSLNPSGMFMNGTN | |
| | CTGCGTCAAGGCGCGCAAAACGCTGCT | | GLQVWDTAFAVQYACVCG | |
| | CACCAAGTTTGGCGGCGCCATCAACAA | | FAELPQYQKTIRAAFDFLDR | |
| | CCCCCATTGGGGCAAGATCTTGCTGTC | | SQINEPTEENSYRDDRVGG | |
| | GATTCTCAATCTCTACAAATGGGAGGG | | WPFSTKTQGYPVSDCTAEA | |
| | TGTGAATCCGGCCCCTGGCGAGCTCTG | | LKAIIMVQNTPGYEDLKKQ | |
| | GCTGTTGCCCTACTTTGTTCCTGTTCAT | | VSDKRKHTAIDLLLGMQNV | |
| | CCGGGCCGATGGTGGGTCCATACCCGG | | GSFEPGSFASYEPIRASSML | |
| | TGGATCTACCTTGCCATGGGCTATCTG | | EKINPAEVFGYIMVEYPYEE | |
| | GAGGCTGCGGAGGCCCAATGCGAACT | | CTDSVVLGLSYFRKYHDYR | |
| | CACTCCGTTGCTGGAGGAGCTCCGAGA | | NEDVDRAISAAIGYIIREQQ | |
| | CGAAATCTACAAAAAGCCCTACTCGGA | | PDGGFFGSWGVCYCYAHM | |
| | GATTGATTTCTCCAAACATTGCAACTC | | FAMEALETQNLNYNNCSTV | |
| | CATCTCCGGAGTCGACCTCTACTATCC | | QKACDFLAGYQEADGGWA | |
| | CCACACCGGCCTTTTGAAGTTTGGCAA | | EDFKSCETQMYVRGPHSLV | |
| | CGCGCTTCTCCGACGATACCGCAAGTT | | VPTAMALLSLMSGRYPQED | |
| | CAGACCGCAGTGGATCAAAGAAAAGG | | KIHAAARFLMSKQMSNGE | |
| | TCAAGGAGGAAATTTACAACTTGTGCC | | WLKEEMEGVFNHTCAIEYP | |
| | TTCGAGAGGTTTCCAACACACGACACT | | NYRFYFVMKALGLYFKGY | |
| | TGTGTCTCGCTCCCGTCAACAATGCCA | | CQ | |
| | TGACCTCCATTGTCATGTATCTCCATGA | | | |
| | GGGGCCCGATTCGGCGAATTACAAAA | | | |
| | AGATTGCGGCCCGATGGCCCGAATTTC | | | |
| | TGTCTCTGAATCCGTCGGGAATGTTTA | | | |
| | TGAACGGCACCAACGGTCTGCAGGTCT | | | |
| | GGGATACTGCGTTTGCCGTGCAATACG | | | |
| | CGTGTGTTTGTGGCTTTGCCGAACTTCC | | | |
| | CCAGTACCAGAAGACGATCCGAGCGG | | | |
| | CGTTTGATTTTCTCGATCGGTCCCAGAT | | | |
| | CAACGAGCCGACGGAGGAAAATTCCT | | | |
| | ATCGAGACGACCGCGTCGGAGGATGG | | | |
| | CCCTTTAGTACCAAGACCCAGGGGTAT | | | |
| | CCAGTCTCCGACTGTACTGCCGAGGCT | | | |
| | CTCAAGGCCATCATCATGGTCCAGAAT | | | |
| | ACGCCTGGATACGAGGATCTGAAGAA | | | |
| | ACAAGTGTCTGACAAGCGGAAACACA | | | |
| | CTGCCATCGATCTACTTTTGGGAATGC | | | |
| | AGAACGTGGGCTCGTTTGAACCGGGCT | | | |
| | CTTTCGCCTCCTATGAGCCTATCCGGG | | | |
| | CGTCGTCCATGCTGGAGAAGATCAATC | | | |
| | CGGCCGAGGTGTTTGGATACATCATGG | | | |
| | TGGAGTATCCGTACGAGGAATGCACTG | | | |
| | ATTCTGTTGTTCTGGGTCTGTCCTACTT | | | |
| | TCGAAAGTACCACGATTACCGCAACGA | | | |
| | AGACGTGGACCGAGCCATCTCTGCTGC | | | |
| | CATTGGATACATTATTCGAGAGCAGCA | | | |
| | GCCTGACGGCGGCTTCTTTGGCTCCTG | | | |
| | GGGCGTGTGCTACTGCTACGCTCACAT | | | |
| | GTTTGCCATGGAGGCTCTGGAGACGCA | | | |
| | GAATCTCAACTATAACAACTGTTCCAC | | | |
| | AGTTCAAAAGGCGTGCGACTTTCTGGC | | | |
| | GGGCTACCAGGAAGCAGATGGAGGCT | | | |
| | GGGCCGAGGACTTTAAGTCGTGCGAGA | | | |
| | CTCAGATGTACGTGCGCGGACCCCATT | | | |
| | CGCTGGTCGTGCCTACTGCCATGGCCC | | | |
| | TGTTGAGTTTGATGAGTGGTCGGTATC | | | |
| | CCCAGGAGGACAAGATTCATGCTGCGG | | | |
| | CCCGGTTTCTCATGAGCAAGCAGATGA | | | |
| | GCAACGGTGAGTGGCTCAAGGAGGAG | | | |
| | ATGGAGGGGGTGTTTAACCATACTTGT | | | |
| | GCCATTGAGTATCCCAACTACCGGTTT | | | |
| | TATTTTGTCATGAAGGCTTTGGGGTTGT | | | |
| | ATTTCAAGGGATATTGCCAGTGA | | | |
| 4B12 | ATGGGAATCCACGAAAGTGTGTCGAA | 63 | MGIHESVSKQFAKNGHSKY | 84 |
| | ACAGTTTGCGAAAAACGGACATTCCAA | | RSDRYGLPKTDLRRWTFHA | |
| | GTACCGCAGCGACCGATACGGCTTACC | | SDLGAQWWKYDDTTPLEE | |
| | TAAGACGGATCTGCGACGATGGACGTT | | LEKRATDYVKYSLELPGYA | |
| | CCACGCGTCCGATCTGGGGGCGCAATG | | PVTLDSKPVKNAYEAALKN | |
| | GTGGAAGTATGACGATACCACACCGCT | | WHLFASLQDPDSGAWQSE | |
| | GGAAGAGCTGGAAAAGAGGGCTACCG | | YDGPQFMSIGYVTACYFGG | |
| | ACTACGTCAAATACTCGCTGGAGCTGC | | NEIPTPVKTEMIRYIVNTAH | |
| | CGGGATACGCGCCCGTGACTCTGGACT | | PVDGGWGLHKEDKSTCFG | |
| | CCAAGCCCGTGAAAAATGCCTACGAA | | TSNNYVVLRLLGLSRDHPV | |
| | GCGGCTCTCAAAAACTGGCATCTGTTT | | CVKARKTLLTKFGGAINNP | |
| | GCGTCGCTGCAAGACCCCGACTCCGGC | | HWGKTWLSILNLYKWEGV | |
| | GCATGGCAGTCGGAATACGACGGACC | | NPAPGELWLLPYFVPVHPG | |
| | GCAGTTCATGTCGATCGGTTATGTGAC | | RWWVHTRWIYLAMGYLE | |
| | GGCGTGCTACTTTGGCGGCAACGAGAT | | AAEAQCELTPLLEELRDEIY | |
| | CCCCACGCCGGTCAAAACCGAAATGAT | | KKPYSEIDFSKHCNSISGVD | |
| | CAGATACATTGTCAACACAGCCCACCC | | LYYPHTGLLKFGNALLRRY | |
| | AGTTGACGGAGGCTGGGGCCTTCACAA | | RKFRPQWIKEKVKEEIYNL | |
| | AGAAGACAAGAGCACCTGTTTCGGTAC | | CLREVSNTRHLCLAPVNNA | |
| | CAGCAACAACTACGTGGTCCTGCGACT | | MTSIVMYLHEGPDSANYKK | |
| | ACTGGGCCTGTCACGGGATCATCCGGT | | IAARWPEFLSLNPSGMFMN | |
| | CTGCGTCAAGGCGCGCAAAACGCTGCT | | GTNGLQVWDTAFAVQYAS | |
| | CACCAAGTTTGGCGGCGCCATCAACAA | | VCGFAELPQYQKTIRAAFD | |
| | CCCCCATTGGGGCAAGACCTGGCTGTC | | FLDRSQINEPTEENSYRDDR | |
| | GATTCTCAATCTCTACAAATGGGAGGG | | VGGWPFSTKTQGYPVSDCT | |
| | TGTGAATCCGGCCCCTGGCGAGCTCTG | | AEALKAIIMVQNTPGYEDL | |
| | GCTGTTGCCCTACTTTGTTCCTGTTCAT | | KKQVSDKRKHTAIDLLLGM | |
| | CCGGGCCGATGGTGGGTCCATACCCGG | | QNVGSFEPGSFASYEPIRAS | |
| | TGGATCTACCTTGCCATGGGCTATCTG | | SMLEKINPAEVFGNIMVEY | |
| | GAGGCTGCGGAGGCCCAATGCGAACT | | PYVECTDSVVMGLSYFRKY | |
| | CACTCCGTTGCTGGAGGAGCTCCGAGA | | HDYRNEDVDRAISAAIGYII | |
| | CGAAATCTACAAAAAGCCCTACTCGGA | | REQQPDGGFFGSWGVCYC | |
| | GATTGATTTCTCCAAACATTGCAACTC | | YAHMFAMEALETQNLNYN | |
| | CATCTCCGGAGTCGACCTCTACTATCC | | NCSTVQKACDFLAGYQEA | |
| | CCACACCGGCCTTTTGAAGTTTGGCAA | | DGGWAEDFKSCETQMYVR | |
| | CGCGCTTCTCCGACGATACCGCAAGTT | | GPHSLVVPTAMALLSLMSS | |
| | CAGACCGCAGTGGATCAAAGAAAAGG | | RYPQEDKIHAAARFLMSKQ | |
| | TCAAGGAGGAAATTTACAACTTGTGCC | | MSNGEWLKEEMEGVFNHT | |
| | TTCGAGAGGTTTCCAACACACGACACT | | CAIEYPNYRFYFVMKALGL | |
| | TGTGTCTCGCTCCCGTCAACAATGCCA | | YFKGYCQ | |
| | TGACCTCCATTGTCATGTATCTCCATGA | | | |
| | GGGGCCCGATTCGGCGAATTACAAAA | | | |
| | AGATTGCGGCCCGATGGCCCGAATTTC | | | |
| | TGTCTCTGAATCCGTCGGGAATGTTTA | | | |
| | TGAACGGCACCAACGGTCTGCAGGTCT | | | |
| | GGGATACTGCGTTTGCCGTGCAATACG | | | |
| | CGAGTGTTTGTGGCTTTGCCGAACTTC | | | |
| | CCCAGTACCAGAAGACGATCCGAGCG | | | |
| | GCGTTTGATTTTCTCGATCGGTCCCAG | | | |
| | ATCAACGAGCCGACGGAGGAAAATTC | | | |
| | CTATCGAGACGACCGCGTCGGAGGATG | | | |
| | GCCCTTTAGTACCAAGACCCAGGGGTA | | | |
| | TCCAGTCTCCGACTGTACTGCCGAGGC | | | |
| | TCTCAAGGCCATCATCATGGTCCAGAA | | | |
| | TACGCCTGGATACGAGGATCTGAAGAA | | | |
| | ACAAGTGTCTGACAAGCGGAAACACA | | | |
| | CTGCCATCGATCTACTTTTGGGAATGC | | | |
| | AGAACGTGGGCTCGTTTGAACCGGGCT | | | |
| | CTTTCGCCTCCTATGAGCCTATCCGGG | | | |
| | CGTCGTCCATGCTGGAGAAGATCAATC | | | |
| | CGGCCGAGGTGTTTGGAAACATCATGG | | | |
| | TGGAGTATCCGTACGTGGAATGCACTG | | | |
| | ATTCTGTTGTTATGGGTCTGTCCTACTT | | | |
| | TCGAAAGTACCACGATTACCGCAACGA | | | |
| | AGACGTGGACCGAGCCATCTCTGCTGC | | | |
| | CATTGGATACATTATTCGAGAGCAGCA | | | |
| | GCCTGACGGCGGCTTCTTTGGCTCCTG | | | |
| | GGGCGTGTGCTACTGCTACGCTCACAT | | | |
| | GTTTGCCATGGAGGCTCTGGAGACGCA | | | |
| | GAATCTCAACTATAACAACTGTTCCAC | | | |
| | GGTTCAAAAGGCGTGCGACTTTCTGGC | | | |
| | GGGCTACCAGGAAGCAGATGGAGGCT | | | |
| | GGGCCGAGGACTTTAAGTCGTGCGAGA | | | |
| | CTCAGATGTACGTGCGCGGACCCCATT | | | |
| | CGCTGGTCGTGCCTACTGCCATGGCCC | | | |
| | TGTTGAGTTTGATGAGTAGTCGGTATC | | | |
| | CCCAGGAGGACAAGATTCATGCTGCGG | | | |
| | CCCGGTTTCTCATGAGCAAGCAGATGA | | | |
| | GCAACGGTGAGTGGCTCAAGGAGGAG | | | |
| | ATGGAGGGGGTGTTTAACCATACTTGT | | | |
| | GCCATTGAGTATCCCAACTACCGGTTT | | | |
| | TATTTTGTCATGAAGGCTTTGGGGTTGT | | | |
| | ATTTCAAGGGATATTGCCAGTGA | | | |
| 2A5 | ATGGGAATCCACGAAAGTGTGTCGAA | 113 | MGIHESVSKQFAKNGHSKY | 323 |
| | ACAGTTTGCGAAAAACGGACATTCCAA | | RSDRYGLPKTDLRRWTFHA | |
| | GTACCGCAGCGACCGATACGGCTTACC | | SDLGAQWWKYDDTTPLEE | |
| | TAAGACGGATCTGCGACGATGGACGTT | | LEKRATDYVKYSLELPGYA | |
| | CCACGCGTCCGATCTGGGGGCGCAATG | | PVTLDSKPVKNAYEAALKN | |
| | GTGGAAGTATGACGATACCACACCGCT | | WHLFASLQDPDSGAWQSE | |
| | GGAAGAGCTGGAAAAGAGGGCTACCG | | YDGPQFMSIGYVTACYFGG | |
| | ACTACGTCAAATACTCGCTGGAGCTGC | | NEIPTPVKTEMIRYIVNTAH | |
| | CGGGATACGCGCCCGTGACTCTGGACT | | PVDGGWGLHKEDKSTCFG | |
| | CCAAGCCCGTGAAAAATGCCTACGAA | | TSINYVVLRLLGLSRDHPVC | |
| | GCGGCTCTCAAAAACTGGCATCTGTTT | | VKARKTLLTKFGGAINNPH | |
| | GCGTCGCTGCAAGACCCCGACTCCGGC | | WGKTWLSILNLYKWEGVN | |
| | GCATGGCAGTCGGAATACGACGGACC | | PAPGVLWLLPYFVPVHPGR | |
| | GCAGTTCATGTCGATCGGTTATGTGAC | | WWVHTRWIYLAMGYLEA | |
| | GGCGTGCTACTTTGGCGGCAACGAGAT | | AEAQCELTPLLEELRDEIYK | |
| | CCCCACGCCGGTCAAAACCGAAATGAT | | KPYSEIDFSKHCNSISGVDL | |
| | CAGATACATTGTCAACACAGCCCACCC | | YYPHTGLLKFGNALLRRYR | |
| | AGTTGACGGAGGCTGGGGCCTTCACAA | | KFRPQWIKEKVKEEIYNLC | |
| | AGAAGACAAGAGCACCTGTTTCGGTAC | | LREVSNTRHLCLAPVNNAM | |
| | CAGCATCAACTACGTGGTCCTGCGACT | | TSIVMYLHEGPDSANYKKI | |
| | ACTGGGCCTGTCACGGGATCATCCGGT | | AARWPEFLSLNPSGMFMN | |
| | CTGCGTCAAGGCGCGCAAAACGCTGCT | | GTNGLQVWDTVFAVQYAC | |
| | CACCAAGTTTGGCGGCGCCATCAACAA | | VCGFAELPLYQKTIRAAFDF | |
| | CCCCCATTGGGGCAAGACCTGGCTGTC | | LDRSQINEPTEENSYRDDRV | |
| | GATTCTCAATCTCTACAAATGGGAGGG | | GGWPFSTKTQGYPVSDCTA | |
| | TGTGAATCCGGCCCCTGGCGTGCTCTG | | EALKAIIMVQNTPGYEDLK | |
| | GCTGTTGCCCTACTTTGTTCCTGTTCAT | | KQVSDKRKHTAIDLLLGMQ | |
| | CCGGGCCGATGGTGGGTCCATACCCGG | | NVGSFEPGSFASYEPIRTSS | |
| | TGGATCTACCTTGCCATGGGCTATCTG | | MLEKINPAEVFGNIMVEYP | |
| | GAGGCTGCGGAGGCCCAATGCGAACT | | YVECTDSVVLGLSCFRKYH | |
| | CACTCCGTTGCTGGAGGAGCTCCGAGA | | DYRNEDVDRAISAAIGYIIR | |
| | CGAAATCTACAAAAAGCCCTACTCGGA | | EQQPDGGFFGSWGVCYCY | |
| | GATTGATTTCTCCAAACATTGCAACTC | | AHMFAMEALETQNLNYNN | |
| | CATCTCCGGAGTCGACCTCTACTATCC | | CSTVQKACDFLAGYQEAD | |
| | CCACACCGGCCTTTTGAAGTTTGGCAA | | GGWAEDFKSCETQMYVRG | |
| | CGCGCTTCTCCGACGATACCGCAAGTT | | PHSLVVPTAMALLSLMSGR | |
| | CAGACCGCAGTGGATCAAAGAAAAGG | | YPQEDKIHAAARFLMSKQ | |
| | TCAAGGAGGAAATTTACAACTTGTGCC | | MSNGEWLKEEMEGVFNHT | |
| | TTCGAGAGGTTTCCAACACACGACACT | | CAIEYPNYRFYFVMKALGL | |
| | TGTGTCTCGCTCCCGTCAACAATGCCA | | YFKGYCQ | |
| | TGACCTCCATTGTCATGTATCTCCATGA | | | |
| | GGGGCCCGATTCGGCGAATTACAAAA | | | |
| | AGATTGCGGCCCGATGGCCCGAATTTC | | | |
| | TGTCTCTGAATCCGTCGGGAATGTTTA | | | |
| | TGAACGGCACCAACGGTCTGCAGGTCT | | | |
| | GGGATACTGTGTTTGCCGTGCAATACG | | | |
| | CGTGTGTTTGTGGCTTTGCCGAACTTCC | | | |
| | CCTGTACCAGAAGACGATCCGAGCGGC | | | |
| | GTTTGATTTTCTCGATCGGTCCCAGATC | | | |
| | AACGAGCCGACGGAGGAAAATTCCTA | | | |
| | TCGAGACGACCGCGTCGGAGGATGGC | | | |
| | CCTTTAGTACCAAGACCCAGGGGTATC | | | |
| | CAGTCTCCGACTGTACTGCCGAGGCTC | | | |
| | TCAAGGCCATCATCATGGTCCAGAATA | | | |
| | CGCCTGGATACGAGGATCTGAAGAAA | | | |
| | CAAGTGTCTGACAAGCGGAAACACACT | | | |
| | GCCATCGATCTACTTTTGGGAATGCAG | | | |
| | AACGTGGGCTCGTTTGAACCGGGCTCT | | | |
| | TTCGCCTCCTATGAGCCTATCCGGACG | | | |
| | TCGTCCATGCTGGAGAAGATCAATCCG | | | |
| | GCCGAGGTGTTTGGAAACATCATGGTG | | | |
| | GAGTATCCGTACGTGGAATGCACTGAT | | | |
| | TCTGTTGTTCTGGGTCTGTCCTGCTTTC | | | |
| | GAAAGTACCACGATTACCGCAACGAA | | | |
| | GACGTGGACCGAGCCATCTCTGCTGCC | | | |
| | ATTGGATACATTATTCGAGAGCAGCAG | | | |
| | CCTGACGGCGGCTTCTTTGGCTCCTGG | | | |
| | GGCGTGTGCTACTGCTACGCTCACATG | | | |
| | TTTGCCATGGAGGCTCTGGAGACGCAG | | | |
| | AATCTCAACTATAACAACTGTTCCACG | | | |
| | GTTCAAAAGGCGTGCGACTTTCTGGCG | | | |
| | GGCTACCAGGAAGCAGATGGAGGCTG | | | |
| | GGCCGAGGACTTTAAGTCGTGCGAGAC | | | |
| | TCAGATGTACGTGCGCGGACCCCATTC | | | |
| | GCTGGTCGTGCCTACTGCCATGGCCCT | | | |
| | GTTGAGTTTGATGAGTGGTCGGTATCC | | | |
| | CCAGGAGGACAAGATTCATGCTGCGGC | | | |
| | CCGGTTTCTCATGAGCAAGCAGATGAG | | | |
| | CAACGGTGAGTGGCTCAAGGAGGAGA | | | |
| | TGGAGGGGGTGTTTAACCATACTTGTG | | | |
| | CCATTGAGTATCCCAACTACCGGTTTT | | | |
| | ATTTTGTCATGAAGGCTTTGGGGTTGT | | | |
| | ATTTCAAGGGATATTGCCAGTGA | | | |
| 2B3 | ATGGGAATCCACGAAAGTGTGTCGAA | 114 | MGIHESVSKQFAKNGHSKY | 324 |
| | ACAGTTTGCGAAAAACGGACATTCCAA | | RSDRYGLPKTDLRRWTFHA | |
| | GTACCGCAGCGACCGATACGGCTTACC | | SDLGAQWWKYDDTTPLEE | |
| | TAAGACGGATCTGCGACGATGGACGTT | | LEKRATDYVKYSLELPGYA | |
| | CCACGCGTCCGATCTGGGGGCGCAATG | | PVTLDSKPVKNAYEAALKN | |
| | GTGGAAGTATGACGATACCACACCGCT | | WHLFASLQDPDSGAWQSE | |
| | GGAAGAGCTGGAAAAGAGGGCTACCG | | YDGPQFMSIGYVTACYFGG | |
| | ACTACGTCAAATACTCGCTGGAGCTGC | | NEIPTPVKTEMIRYIVNTAH | |
| | CGGGATACGCGCCCGTGACTCTGGACT | | PVDGGWGLHKEDKSTCFG | |
| | CCAAGCCCGTGAAAAATGCCTACGAA | | TSINYVVLRLLGLSRDHPVC | |
| | GCGGCTCTCAAAAACTGGCATCTGTTT | | VKARKTLLTKFGGAINNPH | |
| | GCGTCGCTGCAAGACCCCGACTCAGGC | | WGKTWLSILNLYKWEGVN | |
| | GCATGGCAGTCGGAATACGACGGACC | | PAPGELWLLPYFVPVHPGR | |
| | GCAGTTCATGTCGATCGGTTATGTGAC | | WWVHTRWIYLAMGYLEA | |
| | GGCGTGCTACTTTGGCGGCAACGAGAT | | AEAQCELTPLLEELRDEIYK | |
| | CCCCACGCCGGTCAAAACCGAAATGAT | | KPYSGIDFSKHCNSISGVDL | |
| | CAGATACATTGTCAACACAGCCCACCC | | YYPHTGLLKFGNALLRRYR | |
| | AGTTGACGGAGGCTGGGGCCTTCACAA | | KFRPQWINEKVKEEIYNLC | |
| | AGAAGACAAGAGCACCTGTTTCGGTAC | | LREVSNTRHLCLAPVNNAM | |
| | CAGCATCAACTACGTGGTCCTGCGACT | | TSIVMYLHEGPDSANYKKI | |
| | ACTGGGCCTGTCACGGGATCATCCGGT | | AARWPEFLSLNPSGMFMN | |
| | CTGCGTCAAGGCGCGCAAAACGCTGCT | | GTNGLQVWDTAFAVQYAC | |
| | CACCAAGTTTGGCGGCGCCATCAACAA | | VCGFAELPQYQKTIRAAFD | |
| | CCCCCATTGGGGCAAGACCTGGCTGTC | | FLDRSQINEPTEENSYRDDR | |
| | GATTCTCAATCTCTACAAATGGGAGGG | | VGGWPFSTKTQGYPVSDCT | |
| | TGTGAATCCGGCCCCTGGCGAGCTCTG | | AEALKAIIMVQNTPGYEDL | |
| | GCTGTTGCCCTACTTTGTTCCTGTTCAT | | KKQVSDKRKHTAIDLLLGM | |
| | CCGGGCCGATGGTGGGTCCATACCCGG | | QNVGSFEPGSFASYEPIRAS | |
| | TGGATCTACCTTGCCATGGGCTATCTG | | SMLEKINPAEVFGNIMVEY | |
| | GAGGCTGCGGAGGCCCAATGCGAACT | | PYVECTDSVVLGLSYFRKY | |
| | CACTCCGTTGCTGGAGGAGCTCCGAGA | | HDYRNEDVDRAISAAIGYII | |
| | CGAAATCTACAAAAAGCCCTACTCGGG | | REQQPDGGFFGSWGVCYC | |
| | GATTGATTTCTCCAAACATTGCAACTC | | YAHMFAMEALVTQNLNYN | |
| | CATCTCCGGAGTCGACCTCTACTATCC | | NCSTVQKACDFLAGYQEA | |
| | CCACACCGGCCTTTTGAAGTTTGGCAA | | DGGWAEDFKSCETQMYVR | |
| | CGCGCTTCTCCGACGATACCGCAAGTT | | GPHSLVVPTAMALLSLMSG | |
| | CAGACCGCAGTGGATCAATGAAAAGG | | RYPQEDKIHAAARFLMSKQ | |
| | TCAAGGAGGAAATTTACAACTTGTGCC | | MSNGEWLKEEMEGVFNHT | |
| | TTCGAGAGGTTTCCAACACACGACACT | | CAIEYPNYRVYFVMKALGL | |
| | TGTGTCTCGCTCCCGTCAACAATGCCA | | YFKGYCQ | |
| | TGACCTCCATTGTCATGTATCTCCATGA | | | |
| | GGGGCCCGATTCGGCGAATTACAAAA | | | |
| | AGATTGCGGCCCGATGGCCCGAATTTC | | | |
| | TGTCTCTGAATCCGTCGGGAATGTTTA | | | |
| | TGAACGGCACCAACGGTCTGCAGGTCT | | | |
| | GGGATACTGCGTTTGCCGTGCAATACG | | | |
| | CGTGTGTTTGTGGCTTTGCCGAACTTCC | | | |
| | CCAGTACCAGAAGACGATCCGAGCGG | | | |
| | CGTTTGATTTTCTCGATCGGTCCCAGAT | | | |
| | CAACGAGCCGACGGAGGAAAATTCCT | | | |
| | ATCGAGACGACCGCGTCGGAGGATGG | | | |
| | CCCTTTAGTACCAAGACCCAGGGGTAT | | | |
| | CCAGTCTCCGACTGTACTGCCGAGGCT | | | |
| | CTCAAGGCCATCATCATGGTCCAGAAT | | | |
| | ACGCCTGGATACGAGGATCTGAAGAA | | | |
| | ACAAGTGTCTGACAAGCGGAAACACA | | | |
| | CTGCCATCGATCTACTTTTGGGAATGC | | | |
| | AGAACGTGGGCTCGTTTGAACCGGGCT | | | |
| | CTTTCGCCTCCTATGAGCCTATCCGGG | | | |
| | CGTCGTCCATGCTGGAGAAGATCAATC | | | |
| | CGGCCGAGGTGTTTGGAAACATCATGG | | | |
| | TGGAGTATCCGTACGTGGAATGCACTG | | | |
| | ATTCTGTTGTTCTGGGTCTGTCCTACTT | | | |
| | TCGAAAGTACCACGATTACCGCAACGA | | | |
| | AGACGTGGACCGAGCCATCTCTGCTGC | | | |
| | CATTGGATACATTATTCGAGAGCAGCA | | | |
| | GCCTGACGGCGGCTTCTTTGGCTCCTG | | | |
| | GGGCGTGTGCTACTGCTACGCTCACAT | | | |
| | GTTTGCCATGGAGGCTCTGGTGACGCA | | | |
| | GAATCTCAACTATAACAACTGTTCCAC | | | |
| | GGTTCAAAAGGCGTGCGACTTTCTGGC | | | |
| | GGGCTACCAGGAAGCAGATGGAGGCT | | | |
| | GGGCCGAGGACTTTAAGTCGTGCGAGA | | | |
| | CTCAGATGTACGTGCGCGGACCCCATT | | | |
| | CGCTGGTCGTGCCTACTGCCATGGCCC | | | |
| | TGTTGAGTTTGATGAGTGGTCGGTATC | | | |
| | CCCAGGAGGACAAGATTCATGCTGCGG | | | |
| | CCCGGTTTCTCATGAGCAAGCAGATGA | | | |
| | GCAACGGTGAGTGGCTCAAGGAGGAG | | | |
| | ATGGAGGGGGTGTTTAACCATACTTGT | | | |
| | GCCATTGAGTATCCCAACTACCGGGTT | | | |
| | TATTTTGTCATGAAGGCTTTGGGGTTGT | | | |
| | ATTTCAAGGGATATTGCCAGTGA | | | |
| 2F9 | ATGGGAATCCACGAAAGTGTGTCGAA | 115 | MGIHESVSKQFAKNGHSKY | 325 |
| | ACAGTTTGCGAAAAACGGACATTCCAA | | RSDRYGLPKTDLRRWTFHA | |
| | GTACCGCAGCGACCGATACGGCTTACC | | SDLGAQWWEYDDTTPLEE | |
| | TAAGACGGATCTGCGACGATGGACGTT | | LEKRATDYVKYSLELPGYA | |
| | CCACGCGTCCGATCTGGGGGCGCAATG | | PVTLDSKPVKNAYEAAIKN | |
| | GTGGGAGTATGACGATACCACACCGCT | | WHLFASLQDPDSGAWQSE | |
| | GGAAGAGCTGGAAAAGAGGGCTACCG | | YDGPQFMSIGYVTACYFGG | |
| | ACTACGTCAAATACTCGCTGGAGCTGC | | NEIPTPVKTEMIRYIVNTAH | |
| | CGGGATACGCGCCCGTGACTCTGGACT | | PVDGGWGLHKEDKSTCFG | |
| | CCAAGCCCGTGAAAAATGCCTACGAA | | TSINYVVLRLLGLSRDHPVC | |
| | GCGGCTATCAAAAACTGGCATCTGTTT | | VKARKTLLTKFGGAINNPH | |
| | GCGTCGCTGCAAGACCCCGACTCCGGC | | WGKTWLSILNLYKWEGVN | |
| | GCATGGCAGTCGGAATACGACGGACC | | PAPGELWLLPYFVPVHPGR | |
| | GCAGTTCATGTCGATCGGTTATGTGAC | | WWVHTRWIYLAMGYLEA | |
| | GGCGTGCTACTTTGGCGGCAACGAGAT | | AEAQCELTPLLEELRDEIYK | |
| | CCCCACGCCGGTCAAAACCGAAATGAT | | KPYSEIDFSKHCNSISGVDL | |
| | CAGATACATTGTCAACACAGCCCACCC | | YYPHTGLLKFGNALLRRYR | |
| | AGTTGACGGAGGCTGGGGCCTTCACAA | | KFRPQWIKEKVKEEIYNLC | |
| | AGAAGACAAGAGCACCTGTTTCGGTAC | | LREVSNTRHLCLAPVNNAM | |
| | CAGCATCAACTACGTGGTCCTGCGACT | | SSIVMYLHEGPDPANYKKI | |
| | ACTGGGCCTGTCACGGGATCATCCGGT | | AARWPEFLSLNPSGMFMN | |
| | CTGCGTCAAGGCGCGCAAAACGCTGCT | | GTNGLQVWDTAFAVQYAC | |
| | CACCAAGTTTGGCGGCGCCATCAACAA | | VCGFAELPQYQKTIRAAFD | |
| | CCCCCATTGGGGCAAGACCTGGCTGTC | | FLDRSQINEPMEENSYRDD | |
| | GATTCTCAATCTCTACAAATGGGAGGG | | RVGGWPFSTKTQGYPVSDC | |
| | TGTGAATCCGGCCCCTGGCGAGCTCTG | | TAEALKAIIMVQNTPGYED | |
| | GCTGTTGCCCTACTTTGTTCCTGTTCAT | | LKKQVSDKRKHTAIDLLLG | |
| | CCGGGTCGATGGTGGGTCCATACCCGG | | MQNVGSFEPGSFASYEPIRA | |
| | TGGATCTACCTTGCCATGGGCTATCTG | | SSMLEKINPAEVFGNIMVE | |
| | GAGGCTGCGGAGGCCCAATGCGAACT | | YPYVECTDSVVLGLSYFRK | |
| | CACTCCGTTGCTGGAGGAGCTCCGAGA | | YHDYRNEDVDPAISAAIGYI | |
| | CGAAATCTACAAAAAGCCCTACTCGGA | | IREQQPDGGFFGSWGVCYC | |
| | GATTGATTTCTCCAAACATTGCAACTC | | YAHMFAMEALETQNLNYN | |
| | CATCTCCGGAGTCGACCTCTACTATCC | | NCSTVQKACDFLAGYQEA | |
| | CCACACCGGCCTTTTGAAGTTTGGCAA | | DGGWAEDFKSCETQMYVR | |
| | CGCGCTTCTCCGACGATACCGCAAGTT | | GPHSLVVPTAMALLSLMSG | |
| | CAGACCGCAGTGGATCAAAGAAAAGG | | RYPQEDKIHAAARFLMSKQ | |
| | TCAAGGAGGAAATTTACAACTTGTGCC | | MSNGEWLKEEMEGVFNHT | |
| | TTCGAGAGGTTTCCAACACACGACACT | | CAIEYPNYRFYFVMKALGL | |
| | TGTGTCTCGCTCCCGTCAACAATGCCA | | YFKGYCQ | |
| | TGTCCTCCATTGTCATGTATCTCCATGA | | | |
| | GGGGCCCGATCCGGCGAATTACAAAA | | | |
| | AGATTGCGGCCCGATGGCCCGAATTTC | | | |
| | TGTCTCTGAATCCGTCGGGAATGTTTA | | | |
| | TGAACGGCACCAACGGTCTGCAGGTCT | | | |
| | GGGATACTGCGTTTGCCGTGCAATACG | | | |
| | CGTGTGTTTGTGGCTTTGCCGAACTTCC | | | |
| | CCAGTACCAGAAGACGATCCGAGCGG | | | |
| | CGTTTGATTTTCTCGATCGGTCCCAGAT | | | |
| | CAACGAGCCGATGGAGGAAAATTCCT | | | |
| | ATCGAGACGACCGCGTCGGAGGATGG | | | |
| | CCCTTTAGTACCAAGACCCAGGGGTAT | | | |
| | CCAGTCTCCGACTGTACTGCCGAGGCT | | | |
| | CTCAAGGCCATCATCATGGTCCAGAAT | | | |
| | ACACCTGGATACGAGGATCTGAAGAA | | | |
| | ACAAGTGTCTGACAAGCGGAAACACA | | | |
| | CTGCCATCGATCTACTTTTGGGAATGC | | | |
| | AGAACGTGGGCTCGTTTGAACCGGGCT | | | |
| | CTTTCGCCTCCTATGAGCCTATCCGGG | | | |
| | CGTCGTCCATGCTGGAGAAGATCAATC | | | |
| | CGGCCGAGGTGTTTGGAAACATCATGG | | | |
| | TGGAGTATCCGTACGTGGAATGCACTG | | | |
| | ATTCTGTTGTTCTGGGTCTGTCCTACTT | | | |
| | TCGAAAGTACCACGATTACCGCAACGA | | | |
| | AGACGTGGACCCAGCCATCTCTGCTGC | | | |
| | CATTGGATACATTATTCGAGAGCAGCA | | | |
| | GCCTGACGGCGGCTTCTTTGGCTCCTG | | | |
| | GGGCGTGTGCTACTGCTACGCTCACAT | | | |
| | GTTTGCCATGGAGGCTCTGGAGACGCA | | | |
| | GAATCTCAACTATAACAACTGTTCCAC | | | |
| | GGTTCAAAAGGCGTGCGACTTTCTGGC | | | |
| | GGGCTACCAGGAAGCAGATGGAGGCT | | | |
| | GGGCCGAGGACTTTAAGTCGTGCGAGA | | | |
| | CTCAGATGTACGTGCGCGGACCCCATT | | | |
| | CGCTGGTCGTGCCTACTGCCATGGCCC | | | |
| | TGTTGAGTTTGATGAGTGGTCGGTATC | | | |
| | CCCAGGAGGACAAGATTCATGCTGCGG | | | |
| | CCCGGTTTCTCATGAGCAAGCAGATGA | | | |
| | GCAACGGTGAGTGGCTCAAGGAGGAG | | | |
| | ATGGAGGGGGTGTTTAACCATACTTGT | | | |
| | GCCATTGAGTATCCCAACTACCGGTTT | | | |
| | TATTTTGTCATGAAGGCTTTGGGGTTGT | | | |
| | ATTTCAAGGGATATTGCCAGTGA | | | |
| 1A3 | ATGGGAATCCACGAAAGTGTGTCGAA | 330 | MGIHESVSKQFAKNGHSKY | 331 |
| | ACAGTTTGCGAAAAACGGACATTCCAA | | RSDRYGLPKTDLRQWTFHA | |
| | GTACCGCAGCGACCGATACGGCTTACC | | SDLGAQWWKYDDTTPLEE | |
| | TAAGACGGATCTGCGACAATGGACGTT | | LEKRATDYVKYSLELPGYA | |
| | CCACGCGTCCGATCTGGGGGCGCAATG | | PVTLDSKPVKNAYEAALKN | |
| | GTGGAAGTATGACGATACCACACCGCT | | WHLFASLQDPDSGAWQSE | |
| | GGAAGAGTTGGAAAAGAGGGCTACCG | | YDGPQFMSIGYVTACYFGG | |
| | ACTACGTCAAATACTCGCTGGAGCTGC | | NEIPTPVKTEMIRYIVNTAH | |
| | CGGGATACGCGCCCGTGACTCTGGACT | | PVDGGWGLHKEDKSTCFG | |
| | CCAAGCCCGTGAAAAATGCCTACGAA | | TSINYVVLRLLGLSRDHPVC | |
| | GCGGCTCTCAAAAACTGGCATCTGTTT | | VKACKTLLTKFGGAINNPH | |
| | GCGTCGCTGCAAGACCCCGACTCCGGC | | WGKTWLSILNLYKWEGVN | |
| | GCATGGCAGTCGGAATACGACGGACC | | PAPGELWLLPYFVPVHPGR | |
| | GCAGTTCATGTCGATCGGTTATGTGAC | | WWVHTRWIYLAMGYLEA | |
| | GGCGTGCTACTTTGGCGGCAACGAGAT | | AEAQCELTPLLEELRDEIYK | |
| | CCCCACGCCGGTCAAAACCGAAATGAT | | KPYSEIGFSKHCITISGVDLY | |
| | CAGATACATTGTCAACACAGCCCACCC | | YPHTGLLKFGNALLRRYRK | |
| | AGTTGACGGAGGCTGGGGCCTTCACAA | | FRPQWIKEKVKEEIYNLCLR | |
| | AGAAGACAAGAGCACCTGTTTCGGTAC | | EVSNTRHLCLAPVNNAMTS | |
| | CAGCATCAACTACGTGGTCCTGCGACT | | IVMYLHEGPDSANYKKIAA | |
| | ACTGGGCCTGTCGCGGGATCATCCGGT | | RWPEFLSLNPSGMFMNGTN | |
| | CTGCGTCAAGGCGTGCAAAACGCTGCT | | GLQVWDTAFAVQYACVCG | |
| | CACCAAGTTTGGCGGCGCCATCAACAA | | FAELPQYQKTIRAAFDFLDR | |
| | CCCCCATTGGGGCAAGACCTGGCTGTC | | SQINEPTEENSYRDDRVGG | |
| | GATTCTCAATCTCTACAAATGGGAGGG | | WPFSTKTQGYPVSDCTAEA | |
| | TGTGAATCCGGCCCCTGGCGAGCTCTG | | LKAIIMVQNTPGYEDLKKQ | |
| | GCTGTTGCCCTACTTTGTTCCTGTTCAT | | VSDKRKHTAIDLLLGMQNV | |
| | CCGGGCCGATGGTGGGTCCATACCCGG | | GSFEPGSFASYEPIRASSML | |
| | TGGATCTACCTTGCCATGGGCTATCTG | | EKINPAEVFGNIMVEYPYV | |
| | GAGGCTGCGGAGGCCCAATGCGAACT | | ECTDSVVLGLSYFRKYHDY | |
| | CACTCCGTTGCTGGAGGAGCTCCGAGA | | RNEDVDRAISAAIGYIIREQ | |
| | CGAAATCTACAAAAAGCCCTACTCGGA | | QPDGGFFGSWGVCYCYAH | |
| | GATTGGTTTCTCCAAACATTGCATCAC | | MFAMEALETQSLNYNNCST | |
| | CATCTCCGGAGTCGACCTCTACTATCC | | VQKACDFLAGYQEADGGW | |
| | CCACACCGGCCTTTTGAAGTTTGGCAA | | AEDFKSCETQMYVRGPHSL | |
| | CGCGCTTCTCCGACGATACCGCAAGTT | | VVPTAMALLSLMSGRYPQE | |
| | CAGACCGCAGTGGATCAAAGAAAAGG | | DKIHAAARFLMSKQMSNG | |
| | TCAAGGAGGAAATTTATAACTTGTGCC | | EWLKEEMEGVFNHTCAIEY | |
| | TTCGAGAGGTTTCCAACACACGACACT | | PNYRFYFVMKALGLFFKGY | |
| | TGTGTCTCGCTCCCGTCAACAATGCCA | | CQ | |
| | TGACCTCCATTGTCATGTATCTCCATGA | | | |
| | GGGGCCCGATTCGGCGAATTACAAAA | | | |
| | AGATTGCGGCCCGATGGCCCGAATTTC | | | |
| | TGTCTCTGAATCCGTCGGGAATGTTTA | | | |
| | TGAACGGCACCAACGGTCTGCAGGTCT | | | |
| | GGGATACTGCGTTTGCCGTGCAATACG | | | |
| | CGTGTGTTTGTGGCTTTGCCGAACTTCC | | | |
| | CCAGTACCAGAAGACGATCCGAGCGG | | | |
| | CGTTTGATTTTCTCGATCGGTCCCAGAT | | | |
| | CAACGAGCCGACGGAGGAAAATTCCT | | | |
| | ATCGAGACGACCGCGTCGGAGGATGG | | | |
| | CCCTTTAGTACCAAGACCCAGGGGTAT | | | |
| | CCAGTCTCCGACTGTACTGCCGAGGCT | | | |
| | CTCAAGGCCATCATCATGGTCCAGAAT | | | |
| | ACGCCTGGATACGAGGATCTGAAGAA | | | |
| | ACAAGTGTCTGACAAGCGGAAACACA | | | |
| | CTGCCATCGATCTACTTTTGGGAATGC | | | |
| | AGAACGTGGGCTCGTTTGAACCGGGCT | | | |
| | CTTTCGCCTCCTATGAGCCTATCCGGG | | | |
| | CGTCGTCCATGCTGGAGAAGATCAATC | | | |
| | CGGCCGAGGTGTTTGGAAACATCATGG | | | |
| | TGGAGTATCCGTACGTGGAATGCACTG | | | |
| | ATTCTGTTGTTCTGGGTCTGTCCTACTT | | | |
| | TCGAAAGTACCACGATTACCGCAACGA | | | |
| | AGACGTGGACCGAGCCATCTCTGCTGC | | | |
| | CATTGGATACATTATTCGAGAGCAGCA | | | |
| | GCCTGACGGCGGCTTCTTTGGCTCCTG | | | |
| | GGGCGTGTGCTACTGCTACGCTCACAT | | | |
| | GTTTGCCATGGAGGCTCTGGAGACGCA | | | |
| | GAGTCTCAACTATAACAACTGTTCCAC | | | |
| | GGTTCAAAAGGCGTGCGACTTTCTGGC | | | |
| | GGGCTACCAGGAAGCAGATGGAGGCT | | | |
| | GGGCCGAGGACTTTAAGTCGTGCGAGA | | | |
| | CTCAGATGTACGTGCGCGGACCCCATT | | | |
| | CGCTGGTCGTGCCTACTGCCATGGCCC | | | |
| | TGTTGAGTTTGATGAGTGGTCGGTATC | | | |
| | CCCAGGAGGACAAGATTCATGCTGCGG | | | |
| | CCCGGTTTCTCATGAGCAAGCAGATGA | | | |
| | GCAACGGTGAGTGGCTCAAGGAGGAG | | | |
| | ATGGAGGGGGTGTTTAACCATACTTGT | | | |
| | GCCATTGAGTATCCCAACTACCGGTTT | | | |
| | TATTTTGTCATGAAGGCTTTGGGGTTGT | | | |
| | TTTTCAAGGGATATTGCCAGTGA | | | |
| 2H4 | ATGGGAATCCACGAAAGTGTGTCGAA | 116 | MGIHESVSKQFAKNGHSKY | 85 |
| | ACAGTTTGCGAAAAACGGACATTCCAA | | RSDRYGLPKTDLRRWTFHA | |
| | GTACCGCAGCGACCGATACGGCTTACC | | SDLGAQWWKYDDTTPLEE | |
| | TAAGACGGATCTGCGACGATGGACGTT | | LEKRATDYVKYSLELPGYA | |
| | CCACGCGTCCGATCTGGGGGCGCAATG | | PVTLDSKPVKNAYEAALKN | |
| | GTGGAAGTATGACGATACCACACCGCT | | WHLFASLQDPDSGAWQSE | |
| | GGAAGAGCTGGAAAAGAGGGCTACCG | | YDGPQFMSIGYVTACYFGG | |
| | ACTACGTCAAATACTCGCTGGAGCTGC | | NEIPTPVKTEMIRYIVNTAH | |
| | CGGGATACGCGCCCGTGACTCTGGACT | | PVDGGWGLHKEDKSTCFG | |
| | CCAAGCCCGTGAAAAATGCCTACGAA | | TSINYVVLRLLGLSRDHPVC | |
| | GCGGCTCTCAAAAACTGGCATCTGTTT | | VKARKTLLTKFGGAINNPH | |
| | GCGTCGCTGCAAGACCCCGACTCCGGC | | WGKTWLSILNLYKWEGVN | |
| | GCATGGCAGTCGGAATACGACGGACC | | PAPGELWLLPYFVPVHPGR | |
| | GCAGTTCATGTCGATCGGTTATGTGAC | | WWVHTRWIYLAMGYLEA | |
| | GGCGTGCTACTTTGGCGGCAACGAGAT | | AEAQCELTPLLEELRDEIYK | |
| | CCCCACGCCGGTCAAAACCGAAATGAT | | KPYSEIDFSKHCNSISGVDL | |
| | CAGATACATTGTCAACACAGCCCACCC | | YYPHTGLLKFGNALLRRYR | |
| | AGTTGACGGAGGCTGGGGCCTTCACAA | | KFRPQWIKEKVKEEIYNLC | |
| | AGAAGACAAGAGCACCTGTTTCGGTAC | | LREVSNTRHLCLAPVNNAM | |
| | CAGCATCAACTACGTGGTCCTGCGACT | | TSIVMYLHEGPDSANYKKI | |
| | ACTGGGCCTGTCACGGGATCATCCGGT | | AARWPEFLSLNPSGMFMN | |
| | CTGCGTCAAGGCGCGCAAAACGCTGCT | | GTNGLQVWDTAFAVQYAC | |
| | CACCAAGTTTGGCGGCGCCATCAACAA | | VCGFAELPQYQKTIRAASD | |
| | CCCCCATTGGGGCAAGACCTGGCTGTC | | FLDRSQINEPTEENSYRDGR | |
| | GATTCTCAATCTCTACAAATGGGAGGG | | VGGWPFSTKTQGYPVSDCT | |
| | TGTGAATCCGGCCCCTGGCGAGCTCTG | | AEALKAIIMVQNTPGYEDL | |
| | GCTGTTGCCCTACTTTGTTCCTGTTCAT | | KKQVSDKRKHTAIDLLLGM | |
| | CCGGGCCGATGGTGGGTCCATACCCGG | | QNVGSFEPGSFASYEPIRAS | |
| | TGGATCTACCTTGCCATGGGCTATCTG | | SMLEKFNPAEVFGNIMVEY | |
| | GAGGCTGCGGAGGCCCAATGCGAACT | | PYVECTDSVVLGLSYFRKY | |
| | CACTCCGTTGCTGGAGGAGCTCCGAGA | | HDYRNEDVDRAISAAIGYII | |
| | CGAAATCTACAAAAAGCCCTACTCGGA | | REQQPDGGFFGSWGVCYC | |
| | GATTGATTTCTCCAAACATTGCAACTC | | YAHMFAMEALETQNLNYN | |
| | CATCTCCGGAGTCGACCTCTACTATCC | | NCSTVQKACDFLAGYQEA | |
| | CCACACCGGCCTTTTGAAGTTTGGCAA | | DGGWAEDFKSCETQMYVR | |
| | CGCGCTTCTCCGACGATACCGCAAGTT | | GPHSLVVPTAMALLSLMSG | |
| | CAGACCGCAGTGGATCAAAGAAAAGG | | RYPQEDKIHAAARFLMSKQ | |
| | TCAAGGAGGAAATTTACAACTTGTGCC | | MSNGEWLKEEMEGVFNHT | |
| | TTCGAGAGGTTTCCAACACACGACACT | | CAIEYPNYRFYFVMKALGL | |
| | TGTGTCTCGCTCCCGTCAACAATGCCA | | YFKGYCQ | |
| | TGACCTCCATTGTCATGTATCTCCATGA | | | |
| | GGGGCCCGATTCGGCGAATTACAAAA | | | |
| | AGATTGCGGCCCGATGGCCCGAATTTC | | | |
| | TGTCTCTGAATCCGTCGGGAATGTTTA | | | |
| | TGAACGGCACCAACGGTCTGCAGGTCT | | | |
| | GGGATACTGCGTTTGCCGTGCAATACG | | | |
| | CGTGTGTTTGTGGCTTTGCCGAACTTCC | | | |
| | CCAGTACCAGAAGACGATCCGAGCGG | | | |
| | CGTCTGATTTTCTCGATCGGTCCCAGAT | | | |
| | CAACGAGCCGACGGAGGAAAATTCCT | | | |
| | ATCGAGACGGCCGCGTCGGAGGATGG | | | |
| | CCCTTTAGTACCAAGACCCAGGGGTAT | | | |
| | CCAGTCTCCGACTGTACTGCCGAGGCT | | | |
| | CTCAAGGCCATCATCATGGTCCAGAAT | | | |
| | ACGCCTGGATACGAGGATCTGAAGAA | | | |
| | ACAAGTGTCTGACAAGCGGAAACACA | | | |
| | CTGCCATCGATCTACTTTTGGGAATGC | | | |
| | AGAACGTGGGCTCGTTTGAACCGGGCT | | | |
| | CTTTCGCCTCCTATGAGCCTATCCGGG | | | |
| | CGTCGTCCATGCTGGAGAAGTTCAATC | | | |
| | CGGCCGAGGTGTTTGGAAACATCATGG | | | |
| | TGGAGTATCCGTACGTGGAATGCACTG | | | |
| | ATTCTGTTGTTCTGGGTCTGTCCTACTT | | | |
| | TCGAAAGTACCACGATTACCGCAACGA | | | |
| | AGACGTGGACCGAGCCATCTCTGCTGC | | | |
| | CATTGGATACATTATTCGAGAGCAGCA | | | |
| | GCCTGACGGTGGCTTCTTTGGCTCCTG | | | |
| | GGGCGTGTGCTACTGCTACGCTCACAT | | | |
| | GTTTGCCATGGAGGCTCTGGAGACGCA | | | |
| | GAATCTCAACTATAACAACTGTTCCAC | | | |
| | GGTTCAAAAGGCGTGCGACTTTCTGGC | | | |
| | GGGCTACCAGGAAGCAGATGGAGGCT | | | |
| | GGGCCGAGGACTTTAAGTCGTGCGAGA | | | |
| | CTCAGATGTACGTGCGCGGACCCCATT | | | |
| | CGCTGGTCGTGCCTACTGCCATGGCCC | | | |
| | TGTTGAGTTTGATGAGTGGTCGGTATC | | | |
| | CCCAGGAGGACAAGATTCATGCTGCGG | | | |
| | CCCGGTTTCTCATGAGCAAGCAGATGA | | | |
| | GCAACGGTGAGTGGCTCAAGGAGGAG | | | |
| | ATGGAGGGGGTGTTTAACCATACTTGT | | | |
| | GCCATTGAGTATCCCAACTACCGGTTT | | | |
| | TATTTTGTCATGAAGGCTTTGGGGTTGT | | | |
| | ATTTCAAGGGATATTGCCAGTGA | | | |
| 2F6 | ATGGGAATCCACGAAAGTGTGTCGAA | 4 | MGIHESVSKQFAKNGHSKY | 3 |
| | ACAGTTTGCGAAAAACGGACATTCCAA | | RSDRYGLPKTDLRRWTFHA | |
| | GTACCGCAGCGACCGATACGGCTTACC | | SDLGAQWWKYDGTTPLEE | |
| | TAAGACGGATCTGCGACGATGGACGTT | | LEKRATDYVRYSLELPGYA | |
| | CCACGCGTCCGATCTGGGGGCGCAATG | | PVTLDSKPVKNAYEAALKS | |
| | GTGGAAGTATGACGGTACCACACCGCT | | WHLFASLQDPDSGAWQSE | |
| | GGAAGAGCTGGAAAAGAGGGCTACCG | | YDGPQFMSIGYVTACYFGG | |
| | ACTACGTCAGATACTCGCTGGAGCTGC | | NEIPTPVKTEMIRYIVNTAH | |
| | CGGGATACGCGCCCGTGACTCTGGACT | | PVDGGWGLHKEDKSTCFG | |
| | CCAAGCCCGTGAAAAATGCCTACGAA | | TSINYVVLRLLGLSRDHPVC | |
| | GCGGCTCTCAAAAGCTGGCATCTGTTT | | VKARKTLLTKFGGAINNPH | |
| | GCGTCGCTGCAAGACCCCGACTCCGGC | | WGKTWLSILNLYKWEGVN | |
| | GCATGGCAGTCGGAATACGACGGACC | | PAPGELWLLPYFVPVHPGR | |
| | GCAGTTCATGTCGATCGGTTATGTGAC | | WWVHTRWIYLAMGYLEA | |
| | GGCGTGCTACTTTGGCGGCAACGAGAT | | AEAQCELTPLLEELRDEIYK | |
| | CCCCACGCCGGTCAAAACCGAAATGAT | | KPYSEIDFSKHCNSISGVDL | |
| | CAGATACATTGTCAACACAGCCCACCC | | YYPHTGLLKFGNALLRRYR | |
| | AGTTGACGGAGGCTGGGGCCTTCACAA | | KFRPQWIKEKVKEEIYNLC | |
| | AGAAGACAAGAGCACCTGTTTCGGTAC | | LREVSNTRHLCLAPVNNAM | |
| | CAGCATCAACTACGTGGTCCTGCGACT | | TSIVMYLHEGPDSANYKKI | |
| | ACTGGGCCTGTCACGGGATCATCCGGT | | AARWPEFLSLNPSGMFMN | |
| | CTGCGTCAAGGCGCGCAAAACGCTGCT | | GTNGLQVWDTAFAVQYAC | |
| | CACCAAGTTTGGCGGCGCCATCAACAA | | VCSFAELPQYQKTIRAAFDF | |
| | CCCCCATTGGGGCAAGACCTGGCTGTC | | LDRSQINEPTEENSYRDDRV | |
| | GATTCTCAATCTCTACAAATGGGAGGG | | GGWPFSTKTQGYPVSDCTA | |
| | TGTGAATCCGGCCCCTGGCGAGCTCTG | | EALKAIIMVQNTPGYEDLK | |
| | GCTGTTGCCCTACTTTGTTCCTGTTCAT | | KQVSDKRKHTAIDLLLGMQ | |
| | CCGGGCCGATGGTGGGTCCATACCCGG | | NVGSFEPGSFASYEPIRASS | |
| | TGGATCTACCTTGCCATGGGCTATCTG | | MLEKINPAEVFGNIMVEYP | |
| | GAGGCTGCGGAGGCCCAATGCGAACT | | YVECTDSVVLGLSYFRKYH | |
| | CACTCCGTTGCTGGAGGAGCTCCGAGA | | DYRNEDVDRAISAAIGYIIR | |
| | CGAAATCTACAAAAAGCCCTACTCGGA | | EQQPDGGFFGSWGVCYCY | |
| | GATTGATTTCTCCAAACATTGCAACTC | | AHMFAMEALVTQNLNYNN | |
| | CATCTCCGGAGTCGACCTCTACTATCC | | CSTVQKACDFLAGYQEAD | |
| | CCACACCGGCCTTTTGAAGTTTGGCAA | | GGWAEDFKSCETQMYVRG | |
| | CGCGCTTCTCCGACGATACCGCAAGTT | | PHSLVVPTAMALLSLMSGR | |
| | CAGACCGCAGTGGATCAAAGAAAAGG | | YPQEDKIHAAARFLMSKQ | |
| | TCAAGGAGGAAATTTACAACTTGTGCC | | MSNGEWLKEEMEGVFNHT | |
| | TTCGAGAGGTTTCCAACACACGACACT | | CAIEYPNYRLYFVMKALGL | |
| | TGTGTCTCGCTCCCGTCAACAATGCCA | | YFKGYCQ | |
| | TGACCTCCATTGTCATGTATCTCCATGA | | | |
| | GGGGCCCGATTCGGCGAATTACAAAA | | | |
| | AGATTGCGGCCCGATGGCCCGAATTTC | | | |
| | TGTCTCTGAATCCGTCGGGAATGTTTA | | | |
| | TGAACGGCACCAACGGTCTGCAGGTCT | | | |
| | GGGATACTGCGTTTGCCGTGCAATACG | | | |
| | CGTGTGTTTGTAGCTTTGCCGAACTTCC | | | |
| | CCAGTACCAGAAGACGATCCGAGCGG | | | |
| | CGTTTGATTTTCTCGATCGGTCCCAGAT | | | |
| | CAACGAGCCGACGGAGGAAAATTCCT | | | |
| | ATCGAGACGACCGCGTCGGAGGATGG | | | |
| | CCCTTTAGTACCAAGACCCAGGGGTAT | | | |
| | CCAGTCTCCGACTGTACTGCCGAGGCT | | | |
| | CTCAAGGCCATCATCATGGTCCAGAAT | | | |
| | ACGCCTGGATACGAGGATCTGAAGAA | | | |
| | ACAAGTGTCTGACAAGCGGAAACACA | | | |
| | CTGCCATCGATCTACTTTTGGGAATGC | | | |
| | AGAACGTGGGCTCGTTTGAACCGGGCT | | | |
| | CTTTCGCCTCCTATGAGCCTATCCGGG | | | |
| | CGTCGTCCATGCTGGAGAAGATCAATC | | | |
| | CGGCCGAGGTGTTTGGAAACATCATGG | | | |
| | TGGAGTATCCGTACGTGGAATGCACTG | | | |
| | ATTCTGTTGTTCTGGGTCTGTCCTACTT | | | |
| | TCGAAAGTACCACGATTACCGCAACGA | | | |
| | AGACGTGGACCGAGCCATCTCTGCTGC | | | |
| | CATCGGATACATTATTCGAGAGCAGCA | | | |
| | GCCTGACGGTGGCTTCTTTGGCTCCTG | | | |
| | GGGCGTGTGCTACTGCTACGCTCACAT | | | |
| | GTTTGCCATGGAGGCTCTGGTGACGCA | | | |
| | GAATCTCAACTATAACAACTGTTCCAC | | | |
| | GGTTCAAAAGGCGTGCGACTTTCTGGC | | | |
| | GGGCTACCAGGAAGCAGATGGAGGCT | | | |
| | GGGCCGAGGACTTTAAGTCGTGCGAGA | | | |
| | CTCAGATGTACGTGCGCGGACCCCATT | | | |
| | CGCTGGTCGTGCCTACTGCCATGGCCC | | | |
| | TGTTGAGTTTGATGAGTGGTCGGTATC | | | |
| | CCCAGGAGGACAAGATTCATGCTGCGG | | | |
| | CCCGGTTTCTCATGAGCAAGCAGATGA | | | |
| | GCAACGGTGAGTGGCTCAAGGAGGAG | | | |
| | ATGGAGGGGGTGTTTAACCATACTTGT | | | |
| | GCCATTGAGTATCCCAACTACCGGTTA | | | |
| | TATTTTGTCATGAAGGCTTTGGGGTTGT | | | |
| | ATTTCAAGGGATATTGCCAGTGA | | | |
| 3A5 | ATGGGAATCCACGAAAGTGTGTCGAA | 117 | MGIHESVSKQFAKNGHSKY | 326 |
| | ACAGTTTGCGAAAAACGGACATTCCAA | | RSDRYGLPKTDLRRWTFHA | |
| | GTACCGCAGCGACCGATACGGCTTACC | | SDLGAQWWKYDDTTPLEE | |
| | TAAGACGGATCTGCGACGATGGACGTT | | LEKRATDYVKYSLELPGYA | |
| | CCACGCGTCCGATCTGGGGGCGCAATG | | PVTLDSKPVKNAYEAALKN | |
| | GTGGAAGTATGACGATACCACACCGCT | | WHLFASLQDPDSGAWQSE | |
| | GGAAGAGCTGGAAAAGAGGGCTACCG | | YDGPQFMSIGYVTACYFGG | |
| | ACTACGTCAAATACTCGCTGGAGCTGC | | NEIPTPVKTEMIRYIVNTAH | |
| | CGGGATACGCGCCCGTGACTCTGGACT | | PVDGGWGLHKEDKSTCFG | |
| | CCAAGCCCGTGAAAAATGCCTACGAA | | TSINYVVLRLLGLSRDHPVC | |
| | GCGGCTCTCAAAAACTGGCATCTGTTT | | VKARKTLVTKFGGAINNPH | |
| | GCGTCGCTGCAAGACCCCGACTCCGGC | | WGKTWLSILNLYKWEGVN | |
| | GCATGGCAGTCGGAATACGACGGACC | | PAPGELWLLPYFVPVHPGR | |
| | GCAGTTCATGTCGATCGGTTATGTGAC | | WWVHTRWIYLAMGYLEA | |
| | GGCGTGCTACTTTGGCGGCAACGAGAT | | AEAQCELTPLLEELRDEIYI | |
| | CCCCACGCCGGTCAAAACCGAAATGAT | | KPYSEIDFSKHCNSISGVDL | |
| | CAGATACATTGTCAACACAGCCCACCC | | YYPHTGLLKFGSALLRRYR | |
| | AGTTGACGGAGGCTGGGGCCTTCACAA | | KFRPQWIKEKVKEEIYNLC | |
| | AGAAGACAAGAGCACCTGTTTCGGTAC | | LREVSNTRHLCLAPVNNAM | |
| | CAGCATCAACTACGTGGTCCTGCGACT | | TSIVMYLHEGLDSANYKKI | |
| | ACTGGGCCTGTCACGGGATCATCCGGT | | AARWPEFLSLNPSGMFMN | |
| | CTGCGTCAAGGCGCGCAAAACGCTGGT | | GTNGLQVWDTAFAVQYAC | |
| | CACCAAGTTTGGCGGCGCCATCAACAA | | VCGFAELPQYQKTIRAAFD | |
| | CCCCCATTGGGGCAAGACCTGGCTGTC | | FLDRSQINEPTEENSYRDDR | |
| | GATTCTCAATCTCTACAAATGGGAGGG | | VGGWPFSTKTQGYPVSDCT | |
| | TGTGAATCCGGCCCCTGGCGAGCTCTG | | AEALKAIIMVQNTPGYEDL | |
| | GCTGTTGCCCTACTTTGTTCCTGTTCAT | | KKQVSDKRKHTAIDLLLGM | |
| | CCGGGCCGATGGTGGGTCCATACCCGG | | QNVGSFEPGSFASYEPIRAS | |
| | TGGATCTACCTTGCCATGGGCTATCTG | | SMLEKINPAEVFGNIMVEY | |
| | GAGGCTGCGGAGGCCCAATGCGAACT | | PYVECTDSVVLGLSYFRKY | |
| | CACTCCGTTGCTGGAGGAGCTCCGAGA | | HDYRNEDVDRAISAAIGYII | |
| | CGAAATCTACATAAAGCCCTACTCGGA | | REQQPDGGFFGSWGVCYC | |
| | GATTGATTTCTCCAAACATTGCAACTC | | YTHMFAMEALETQNLNYN | |
| | CATCTCCGGAGTCGACCTCTACTATCC | | NCSTVQKACDFLADYQEA | |
| | CCACACCGGCCTTTTGAAGTTTGGCAG | | DGGWAEDLKSCETQMYVR | |
| | CGCGCTTCTCCGACGATACCGCAAGTT | | GPHSLVVPTAMALLSLMSG | |
| | CAGACCGCAGTGGATCAAAGAAAAGG | | RYPQEDKIHAAARFLMSKQ | |
| | TCAAGGAGGAAATTTACAACTTGTGCC | | MSNGEWLKEEMEGVFNHT | |
| | TTCGAGAGGTTTCCAACACACGACACT | | CAIEYPNYRFYFVMKALGL | |
| | TGTGTCTCGCTCCCGTCAACAATGCCA | | YFKGYCQ | |
| | TGACCTCCATTGTCATGTATCTCCATGA | | | |
| | GGGGCTCGATTCGGCGAATTACAAAAA | | | |
| | GATTGCGGCCCGATGGCCCGAATTTCT | | | |
| | GTCTCTGAATCCGTCGGGAATGTTTAT | | | |
| | GAACGGCACCAACGGTCTGCAGGTCTG | | | |
| | GGATACTGCGTTTGCCGTGCAATACGC | | | |
| | GTGTGTTTGTGGCTTTGCCGAACTTCCC | | | |
| | CAGTACCAGAAGACGATCCGAGCGGC | | | |
| | GTTTGATTTTCTCGATCGGTCCCAGATC | | | |
| | AACGAGCCGACGGAGGAAAATTCCTA | | | |
| | TCGAGACGACCGCGTCGGAGGATGGC | | | |
| | CCTTTAGTACCAAGACCCAGGGGTATC | | | |
| | CAGTCTCCGACTGTACTGCCGAGGCTC | | | |
| | TCAAGGCCATCATCATGGTCCAGAATA | | | |
| | CGCCTGGATACGAGGATCTGAAGAAA | | | |
| | CAAGTGTCTGACAAGCGGAAACACACT | | | |
| | GCCATCGATCTACTTTTGGGAATGCAG | | | |
| | AACGTGGGCTCGTTTGAACCGGGCTCT | | | |
| | TTCGCCTCCTATGAGCCTATCCGGGCG | | | |
| | TCGTCCATGCTGGAGAAGATCAATCCG | | | |
| | GCCGAGGTGTTTGGAAACATCATGGTG | | | |
| | GAGTATCCGTACGTGGAATGCACTGAT | | | |
| | TCTGTTGTTCTGGGTCTGTCCTACTTTC | | | |
| | GAAAGTACCACGATTACCGCAACGAA | | | |
| | GACGTGGACCGAGCCATCTCTGCTGCC | | | |
| | ATTGGATATATTATTCGAGAGCAGCAG | | | |
| | CCTGACGGCGGCTTCTTTGGCTCCTGG | | | |
| | GGCGTGTGCTACTGCTACACTCACATG | | | |
| | TTTGCCATGGAGGCTCTGGAGACGCAG | | | |
| | AATCTCAACTATAACAACTGTTCCACG | | | |
| | GTTCAAAAGGCGTGCGACTTTCTGGCG | | | |
| | GACTACCAGGAAGCAGATGGAGGCTG | | | |
| | GGCCGAGGACCTTAAGTCGTGCGAGAC | | | |
| | TCAGATGTACGTGCGCGGACCCCATTC | | | |
| | GCTGGTCGTGCCTACTGCCATGGCCCT | | | |
| | GTTGAGTTTGATGAGTGGTCGGTATCC | | | |
| | CCAGGAGGACAAGATTCATGCTGCGGC | | | |
| | CCGGTTTCTCATGAGCAAGCAGATGAG | | | |
| | CAACGGTGAGTGGCTCAAGGAGGAGA | | | |
| | TGGAGGGGGTGTTTAACCATACTTGTG | | | |
| | CCATTGAGTATCCCAACTACCGGTTTT | | | |
| | ATTTTGTCATGAAGGCTTTGGGGTTGT | | | |
| | ATTTCAAGGGATATTGCCAGTGA | | | |
| 2C5 | ATGGGAATCCACGAAAGTGTGTCGAA | 328 | MGIHESVSKQFAKYGHSKY | 329 |
| | ACAGTTTGCGAAATACGGACATTCCAA | | RSDRYGLPKTDLRRWTFHA | |
| | GTACCGCAGCGACCGATACGGCTTACC | | SDLGAQWWKYDDTTPLEE | |
| | TAAGACGGATCTGCGACGATGGACGTT | | LEKRATDYVKYSLELPGYA | |
| | CCACGCGTCCGATCTGGGGGCGCAATG | | PVTLDSKPVKNAYEAALKN | |
| | GTGGAAGTATGACGATACCACACCGCT | | WHLFASLQDPDSGAWQSE | |
| | GGAAGAGCTGGAAAAGAGGGCTACCG | | YDGPQFMSIGYVTACYFGG | |
| | ACTACGTCAAATACTCGCTGGAGCTGC | | SEIPTPVKTEMIRCIVNTAHP | |
| | CGGGATACGCGCCCGTGACTCTGGACT | | VDGGWGLHKEDKSTCFGT | |
| | CCAAGCCCGTGAAAAATGCCTACGAA | | SINYVVLRLLGLSRDHPVC | |
| | GCGGCTCTCAAAAACTGGCATCTGTTT | | VKAHKTLLTKFGGAINNPH | |
| | GCGTCGCTGCAAGACCCCGACTCCGGC | | WGKTWLSILNLYKWEGVN | |
| | GCATGGCAGTCGGAATACGACGGACC | | PAPGELWLLPYFVPVHPGR | |
| | GCAGTTCATGTCGATCGGTTATGTGAC | | WWVHTRWIYLAMGYLEA | |
| | GGCGTGCTACTTTGGCGGCAGCGAGAT | | AEAQCELTPLLEELRDEIYK | |
| | CCCCACGCCGGTCAAAACCGAAATGAT | | KPYSEFDFSKHCNSISGVDL | |
| | CAGATGCATTGTCAACACAGCCCACCC | | YYPHTGLLKFGNARLRRYR | |
| | AGTTGACGGAGGCTGGGGCCTTCATAA | | KFRPQWIKEKVKEEIYNLC | |
| | AGAAGACAAGAGCACCTGTTTCGGTAC | | LREVSNTRHLCLAPVNNAM | |
| | CAGCATCAACTACGTGGTCCTGCGACT | | TSIVMYLHEGPDSANYKKI | |
| | ACTGGGCCTGTCACGGGATCATCCGGT | | AARWPEFLSLNPSGMFMN | |
| | CTGCGTCAAGGCGCACAAAACGCTGCT | | GTNGLQVWDTAFAVQYAC | |
| | CACCAAGTTTGGCGGCGCCATCAACAA | | VCGFAELPQYQKTIRAAIDF | |
| | CCCCCATTGGGGCAAGACCTGGCTGTC | | LDRSQINVPSEENSYRDDR | |
| | GATTCTCAATCTCTACAAATGGGAGGG | | VGGWPFSTKTQGYPVSDCT | |
| | TGTGAATCCGGCCCCTGGCGAGCTCTG | | AEALKASIMVQNTPGYEDL | |
| | GCTGTTGCCCTACTTTGTTCCTGTTCAT | | KKQVSDKRKHTAIDLLLGM | |
| | CCGGGCCGATGGTGGGTCCATACCCGG | | QNVGSFEPGSFASYEPIRAS | |
| | TGGATCTACCTTGCCATGGGCTATCTG | | SMLEKINPAEVFGNIMVEY | |
| | GAGGCTGCGGAGGCCCAATGCGAACT | | PYVECTDSVVLGLSYFRKY | |
| | CACTCCGTTGCTGGAGGAGCTCCGAGA | | HDYRNEDVDRAISAAIGYII | |
| | CGAAATCTACAAAAAGCCCTACTCGGA | | REQQPDGGFFGSWGVCYC | |
| | GTTTGATTTCTCCAAACATTGCAACTCC | | YAHMFAMEALETQNLNYN | |
| | ATCTCCGGAGTCGACCTCTACTATCCC | | NCSTVQRACDFLAGYQEA | |
| | CACACCGGCCTTTTGAAGTTTGGCAAC | | DGGWAEDFKSCEAQMYVR | |
| | GCGCGTCTCCGACGATACCGCAAGTTC | | GPHSLVVPTAMALLSLMSG | |
| | AGACCGCAGTGGATCAAAGAAAAGGT | | RYPQEDKIHAAARFLMSKQ | |
| | CAAGGAGGAAATTTACAACTTGTGCCT | | MSNGEWLKEEMEGVFNHT | |
| | TCGAGAGGTTTCCAACACACGACACTT | | CAIEYPNYRFYFVMKALGL | |
| | GTGTCTCGCTCCCGTCAACAATGCCAT | | YFKGYCQ | |
| | GACCTCCATTGTCATGTATCTCCATGA | | | |
| | GGGGCCCGATTCGGCGAATTACAAAA | | | |
| | AGATTGCGGCCCGATGGCCCGAATTTC | | | |
| | TGTCTCTGAATCCGTCGGGAATGTTTA | | | |
| | TGAACGGCACCAACGGTCTGCAGGTCT | | | |
| | GGGATACTGCGTTTGCCGTGCAATACG | | | |
| | CGTGTGTTTGTGGCTTTGCCGAACTTCC | | | |
| | CCAGTACCAGAAGACGATCCGAGCGG | | | |
| | CGATTGATTTTCTCGATCGGTCCCAGA | | | |
| | TCAACGTGCCGTCGGAGGAAAATTCCT | | | |
| | ATCGAGACGACCGCGTCGGAGGATGG | | | |
| | CCCTTTAGTACCAAGACCCAGGGGTAT | | | |
| | CCAGTCTCCGACTGTACTGCCGAGGCT | | | |
| | CTCAAGGCCAGCATCATGGTCCAGAAT | | | |
| | ACGCCTGGATACGAGGATCTGAAGAA | | | |
| | ACAAGTGTCTGACAAGCGGAAACACA | | | |
| | CTGCCATCGATCTACTTTTGGGAATGC | | | |
| | AGAACGTGGGCTCGTTTGAACCGGGCT | | | |
| | CTTTCGCCTCCTATGAGCCTATCCGGG | | | |
| | CGTCGTCCATGCTGGAGAAGATCAATC | | | |
| | CGGCCGAGGTGTTTGGAAACATCATGG | | | |
| | TGGAGTATCCGTACGTGGAATGCACTG | | | |
| | ATTCTGTTGTTCTGGGTCTGTCCTACTT | | | |
| | TCGAAAGTACCACGATTACCGCAACGA | | | |
| | AGACGTGGACCGAGCCATCTCTGCTGC | | | |
| | CATTGGATACATTATTCGAGAGCAGCA | | | |
| | GCCTGACGGCGGCTTCTTTGGCTCCTG | | | |
| | GGGCGTGTGCTACTGCTACGCTCACAT | | | |
| | GTTTGCCATGGAGGCTCTGGAGACGCA | | | |
| | GAATCTCAACTATAACAACTGTTCCAC | | | |
| | GGTTCAAAGGGCGTGCGACTTTCTGGC | | | |
| | GGGCTACCAGGAAGCAGATGGAGGCT | | | |
| | GGGCCGAGGACTTTAAGTCGTGCGAGG | | | |
| | CTCAGATGTACGTGCGCGGACCCCATT | | | |
| | CGCTGGTCGTGCCTACTGCCATGGCCC | | | |
| | TGTTGAGTTTGATGAGTGGTCGGTATC | | | |
| | CCCAGGAGGACAAGATTCATGCTGCGG | | | |
| | CCCGGTTTCTCATGAGCAAGCAGATGA | | | |
| | GCAATGGTGAGTGGCTCAAGGAGGAG | | | |
| | ATGGAGGGGGTGTTTAACCATACTTGT | | | |
| | GCCATTGAGTATCCCAACTACCGGTTT | | | |
| | TATTTTGTCATGAAGGCTTTGGGGTTGT | | | |
| | ATTTCAAGGGATATTGCCAGTGA | | | |
| 887779 | ATGGGAATCCACGAAAGTGTGTCGAA | 61 | MGIHESVSKQFAKNGHSKY | 1 |
| | ACAGTTTGCGAAAAACGGACATTCCAA | | RSDRYGLPKTDLRRWTFHA | |
| | GTACCGCAGCGACCGATACGGCTTACC | | SDLGAQWWKYDDTTPLEE | |
| | TAAGACGGATCTGCGACGATGGACGTT | | LEKRATDYVKYSLELPGYA | |
| | CCACGCGTCCGATCTGGGGGCGCAATG | | PVTLDSKPVKNAYEAALKN | |
| | GTGGAAGTATGACGATACCACACCGCT | | WHLFASLQDPDSGAWQSE | |
| | GGAAGAGCTGGAAAAGAGGGCTACCG | | YDGPQFMSIGYVTACYFGG | |
| | ACTACGTCAAATACTCGCTGGAGCTGC | | NEIPTPVKTEMIRYIVNTAH | |
| | CGGGATACGCGCCCGTGACTCTGGACT | | PVDGGWGLHKEDKSTCFG | |
| | CCAAGCCCGTGAAAAATGCCTACGAA | | TSINYVVLRLLGLSRDHPVC | |
| | GCGGCTCTCAAAAACTGGCATCTGTTT | | VKARKTLLTKFGGAINNPH | |
| | GCGTCGCTGCAAGACCCCGACTCCGGC | | WGKTWLSILNLYKWEGVN | |
| | GCGTGGCAGAGCGAATACGACGGACC | | PAPGELWLLPYFVPVHPGR | |
| | GCAGTTCATGAGCATCGGCTATGTGAC | | WWVHTRWIYLAMGYLEA | |
| | GGCGTGCTACTTTGGCGGCAACGAGAT | | AEAQCELTPLLEELRDEIYK | |
| | CCCCACGCCGGTCAAAACCGAAATGAT | | KPYSEIDFSKHCNSISGVDL | |
| | CAGATACATTGTCAACACAGCCCACCC | | YYPHTGLLKFGNALLRRYR | |
| | AGTTGACGGAGGCTGGGGCCTTCACAA | | KFRPQWIKEKVKEEIYNLC | |
| | AGAAGACAAGAGCACCTGCTTCGGTAC | | LREVSNTRHLCLAPVNNAM | |
| | CAGCATCAACTACGTGGTCCTGCGACT | | TSIVMYLHEGPDSANYKKI | |
| | ACTGGGCCTGTCACGGGACCATCCGGT | | AARWPEFLSLNPSGMFMN | |
| | CTGCGTCAAGGCGCGCAAAACGCTGCT | | GTNGLQVWDTAFAVQYAC | |
| | CACCAAGTTTGGCGGCGCCATCAACAA | | VCGFAELPQYQKTIRAAFD | |
| | CCCCCATTGGGGCAAGACCTGGCTGTC | | FLDRSQINEPTEENSYRDDR | |
| | GATTCTCAATCTCTACAAATGGGAGGG | | VGGWPFSTKTQGYPVSDCT | |
| | TGTGAATCCGGCCCCTGGCGAGCTCTG | | AEALKAIIMVQNTPGYEDL | |
| | GCTGTTGCCCTACTTTGTTCCTGTTCAT | | KKQVSDKRKHTAIDLLLGM | |
| | CCGGGCCGATGGTGGGTCCATACCCGG | | QNVGSFEPGSFASYEPIRAS | |
| | TGGATCTACCTTGCCATGGGCTATCTG | | SMLEKINPAEVFGNIMVEY | |
| | GAGGCTGCGGAGGCCCAATGCGAACT | | PYVECTDSVVLGLSYFRKY | |
| | CACTCCGTTGCTGGAGGAGCTCCGAGA | | HDYRNEDVDRAISAAIGYII | |
| | CGAAATCTACAAAAAGCCCTACTCGGA | | REQQPDGGFFGSWGVCYC | |
| | GATTGATTTCTCCAAACATTGCAACTC | | YAHMFAMEALETQNLNYN | |
| | CATCTCCGGAGTCGACCTCTACTATCC | | NCSTVQKACDFLAGYQEA | |
| | CCACACCGGCCTTTTGAAGTTTGGCAA | | DGGWAEDFKSCETQMYVR | |
| | CGCGCTTCTCCGACGATACCGCAAGTT | | GPHSLVVPTAMALLSLMSG | |
| | CAGACCGCAGTGGATCAAAGAAAAGG | | RYPQEDKIHAAARFLMSKQ | |
| | TCAAGGAGGAAATTTACAACTTGTGCC | | MSNGEWLKEEMEGVFNHT | |
| | TTCGAGAGGTTTCCAACACACGACACT | | CAIEYPNYRFYFVMKALGL | |
| | TGTGTCTCGCTCCCGTCAACAATGCCA | | YFKGYCQ | |
| | TGACCTCCATTGTCATGTATCTCCATGA | | | |
| | GGGGCCCGATTCGGCGAATTACAAAA | | | |
| | AGATTGCGGCCCGATGGCCCGAATTTC | | | |
| | TGTCTCTGAATCCGTCGGGAATGTTTA | | | |
| | TGAACGGCACCAACGGTCTCCAGGTCT | | | |
| | GGGATACTGCGTTTGCCGTGCAATACG | | | |
| | CGTGTGTTTGTGGCTTTGCCGAACTTCC | | | |
| | CCAGTACCAGAAGACGATCCGAGCGG | | | |
| | CGTTTGATTTTCTCGATCGGTCCCAGAT | | | |
| | CAACGAGCCGACGGAGGAAAATTCCT | | | |
| | ATCGAGACGACCGCGTCGGAGGATGG | | | |
| | CCCTTTAGTACCAAGACCCAGGGGTAT | | | |
| | CCGGTCTCCGACTGTACTGCCGAGGCT | | | |
| | CTCAAGGCCATCATCATGGTCCAGAAT | | | |
| | ACGCCTGGATACGAGGATCTGAAGAA | | | |
| | ACAAGTGTCTGACAAGCGGAAACACA | | | |
| | CTGCCATCGATCTACTTTTGGGAATGC | | | |
| | AGAACGTGGGCTCGTTTGAACCGGGCT | | | |
| | CTTTCGCCTCCTATGAGCCTATCCGGG | | | |
| | CGTCGTCCATGCTGGAGAAGATCAATC | | | |
| | CGGCCGAGGTGTTTGGAAACATCATGG | | | |
| | TGGAGTATCCGTACGTGGAATGCACTG | | | |
| | ATTCTGTTGTTCTGGGTCTCTCCTACTT | | | |
| | TCGAAAGTACCACGATTACCGCAACGA | | | |
| | AGACGTGGACCGAGCCATCTCTGCTGC | | | |
| | CATTGGATACATTATTCGAGAGCAGCA | | | |
| | GCCTGACGGCGGCTTCTTTGGCTCCTG | | | |
| | GGGCGTGTGCTACTGCTACGCTCACAT | | | |
| | GTTTGCCATGGAGGCTCTGGAGACGCA | | | |
| | GAATCTCAACTATAACAACTGTTCCAC | | | |
| | GGTTCAAAAGGCGTGCGACTTTCTGGC | | | |
| | GGGCTACCAGGAAGCAGATGGAGGCT | | | |
| | GGGCCGAGGACTTTAAGTCGTGCGAGA | | | |
| | CCCAGATGTACGTGCGCGGACCCCATT | | | |
| | CGCTGGTCGTGCCTACTGCCATGGCCC | | | |
| | TGTTGAGTTTGATGAGTGGTCGGTATC | | | |
| | CCCAGGAGGACAAGATTCATGCTGCGG | | | |
| | CCCGGTTTCTCATGAGCAAGCAGATGA | | | |
| | GCAACGGTGAGTGGCTCAAGGAGGAG | | | |
| | ATGGAGGGGGTGTTTAACCATACTTGT | | | |
| | GCCATTGAGTATCCCAACTACCGGTTT | | | |
| | TATTTTGTCATGAAGGCTTTGGGGTTGT | | | |
| | ATTTCAAGGGATATTGCCAGTGA | | | |
| 907811 | ATGGGAATCCACGAAAGTGTGTCGAA | 4 | MGIHESVSKQFAKNGHSKY | 3 |
| | ACAGTTTGCGAAAAACGGACATTCCAA | | RSDRYGLPKTDLRRWTFHA | |
| | GTACCGCAGCGACCGATACGGCTTACC | | SDLGAQWWKYDGTTPLEE | |
| | TAAGACGGATCTGCGACGATGGACGTT | | LEKRATDYVRYSLELPGYA | |
| | CCACGCGTCCGATCTGGGGGCGCAATG | | PVTLDSKPVKNAYEAALKS | |
| | GTGGAAGTATGACGGTACCACACCGCT | | WHLFASLQDPDSGAWQSE | |
| | GGAAGAGCTGGAAAAGAGGGCTACCG | | YDGPQFMSIGYVTACYFGG | |
| | ACTACGTCAGATACTCGCTGGAGCTGC | | NEIPTPVKTEMIRYIVNTAH | |
| | CGGGATACGCGCCCGTGACTCTGGACT | | PVDGGWGLHKEDKSTCFG | |
| | CCAAGCCCGTGAAAAATGCCTACGAA | | TSINYVVLRLLGLSRDHPVC | |
| | GCGGCTCTCAAAAGCTGGCATCTGTTT | | VKARKTLLTKFGGAINNPH | |
| | GCGTCGCTGCAAGACCCCGACTCCGGC | | WGKTWLSILNLYKWEGVN | |
| | GCATGGCAGTCGGAATACGACGGACC | | PAPGELWLLPYFVPVHPGR | |
| | GCAGTTCATGTCGATCGGTTATGTGAC | | WWVHTRWIYLAMGYLEA | |
| | GGCGTGCTACTTTGGCGGCAACGAGAT | | AEAQCELTPLLEELRDEIYK | |
| | CCCCACGCCGGTCAAAACCGAAATGAT | | KPYSEIDFSKHCNSISGVDL | |
| | CAGATACATTGTCAACACAGCCCACCC | | YYPHTGLLKFGNALLRRYR | |
| | AGTTGACGGAGGCTGGGGCCTTCACAA | | KFRPQWIKEKVKEEIYNLC | |
| | AGAAGACAAGAGCACCTGTTTCGGTAC | | LREVSNTRHLCLAPVNNAM | |
| | CAGCATCAACTACGTGGTCCTGCGACT | | TSIVMYLHEGPDSANYKKI | |
| | ACTGGGCCTGTCACGGGATCATCCGGT | | AARWPEFLSLNPSGMFMN | |
| | CTGCGTCAAGGCGCGCAAAACGCTGCT | | GTNGLQVWDTAFAVQYAC | |
| | CACCAAGTTTGGCGGCGCCATCAACAA | | VCSFAELPQYQKTIRAAFDF | |
| | CCCCCATTGGGGCAAGACCTGGCTGTC | | LDRSQINEPTEENSYRDDRV | |
| | GATTCTCAATCTCTACAAATGGGAGGG | | GGWPFSTKTQGYPVSDCTA | |
| | TGTGAATCCGGCCCCTGGCGAGCTCTG | | EALKAIIMVQNTPGYEDLK | |
| | GCTGTTGCCCTACTTTGTTCCTGTTCAT | | KQVSDKRKHTAIDLLLGMQ | |
| | CCGGGCCGATGGTGGGTCCATACCCGG | | NVGSFEPGSFASYEPIRASS | |
| | TGGATCTACCTTGCCATGGGCTATCTG | | MLEKINPAEVFGNIMVEYP | |
| | GAGGCTGCGGAGGCCCAATGCGAACT | | YVECTDSVVLGLSYFRKYH | |
| | CACTCCGTTGCTGGAGGAGCTCCGAGA | | DYRNEDVDRAISAAIGYIIR | |
| | CGAAATCTACAAAAAGCCCTACTCGGA | | EQQPDGGFFGSWGVCYCY | |
| | GATTGATTTCTCCAAACATTGCAACTC | | AHMFAMEALVTQNLNYNN | |
| | CATCTCCGGAGTCGACCTCTACTATCC | | CSTVQKACDFLAGYQEAD | |
| | CCACACCGGCCTTTTGAAGTTTGGCAA | | GGWAEDFKSCETQMYVRG | |
| | CGCGCTTCTCCGACGATACCGCAAGTT | | PHSLVVPTAMALLSLMSGR | |
| | CAGACCGCAGTGGATCAAAGAAAAGG | | YPQEDKIHAAARFLMSKQ | |
| | TCAAGGAGGAAATTTACAACTTGTGCC | | MSNGEWLKEEMEGVFNHT | |
| | TTCGAGAGGTTTCCAACACACGACACT | | CAIEYPNYRLYFVMKALGL | |
| | TGTGTCTCGCTCCCGTCAACAATGCCA | | YFKGYCQ | |
| | TGACCTCCATTGTCATGTATCTCCATGA | | | |
| | GGGGCCCGATTCGGCGAATTACAAAA | | | |
| | AGATTGCGGCCCGATGGCCCGAATTTC | | | |
| | TGTCTCTGAATCCGTCGGGAATGTTTA | | | |
| | TGAACGGCACCAACGGTCTGCAGGTCT | | | |
| | GGGATACTGCGTTTGCCGTGCAATACG | | | |
| | CGTGTGTTTGTAGCTTTGCCGAACTTCC | | | |
| | CCAGTACCAGAAGACGATCCGAGCGG | | | |
| | CGTTTGATTTTCTCGATCGGTCCCAGAT | | | |
| | CAACGAGCCGACGGAGGAAAATTCCT | | | |
| | ATCGAGACGACCGCGTCGGAGGATGG | | | |
| | CCCTTTAGTACCAAGACCCAGGGGTAT | | | |
| | CCAGTCTCCGACTGTACTGCCGAGGCT | | | |
| | CTCAAGGCCATCATCATGGTCCAGAAT | | | |
| | ACGCCTGGATACGAGGATCTGAAGAA | | | |
| | ACAAGTGTCTGACAAGCGGAAACACA | | | |
| | CTGCCATCGATCTACTTTTGGGAATGC | | | |
| | AGAACGTGGGCTCGTTTGAACCGGGCT | | | |
| | CTTTCGCCTCCTATGAGCCTATCCGGG | | | |
| | CGTCGTCCATGCTGGAGAAGATCAATC | | | |
| | CGGCCGAGGTGTTTGGAAACATCATGG | | | |
| | TGGAGTATCCGTACGTGGAATGCACTG | | | |
| | ATTCTGTTGTTCTGGGTCTGTCCTACTT | | | |
| | TCGAAAGTACCACGATTACCGCAACGA | | | |
| | AGACGTGGACCGAGCCATCTCTGCTGC | | | |
| | CATCGGATACATTATTCGAGAGCAGCA | | | |
| | GCCTGACGGTGGCTTCTTTGGCTCCTG | | | |
| | GGGCGTGTGCTACTGCTACGCTCACAT | | | |
| | GTTTGCCATGGAGGCTCTGGTGACGCA | | | |
| | GAATCTCAACTATAACAACTGTTCCAC | | | |
| | GGTTCAAAAGGCGTGCGACTTTCTGGC | | | |
| | GGGCTACCAGGAAGCAGATGGAGGCT | | | |
| | GGGCCGAGGACTTTAAGTCGTGCGAGA | | | |
| | CTCAGATGTACGTGCGCGGACCCCATT | | | |
| | CGCTGGTCGTGCCTACTGCCATGGCCC | | | |
| | TGTTGAGTTTGATGAGTGGTCGGTATC | | | |
| | CCCAGGAGGACAAGATTCATGCTGCGG | | | |
| | CCCGGTTTCTCATGAGCAAGCAGATGA | | | |
| | GCAACGGTGAGTGGCTCAAGGAGGAG | | | |
| | ATGGAGGGGGTGTTTAACCATACTTGT | | | |
| | GCCATTGAGTATCCCAACTACCGGTTA | | | |
| | TATTTTGTCATGAAGGCTTTGGGGTTGT | | | |
| | ATTTCAAGGGATATTGCCAGTGA | | | |

TABLE 12
Non-Limiting Examples of CDSs

| | Nucleotide | Protein |
|---|---|---|
| Name | SEQ ID NO | SEQ ID NO |
| A0A0K9RW03_m | 184 | 224 |
| AquAgaCDS1_m | 185 | 225 |
| AquAgaCDS16 | 186 | 226 |
| AquAgaCDS16 | 327 | 226 |
| AquAgaCDS6 | 187 | 227 |
| BenHisCDS2_m | 188 | 228 |
| A0A0D3QY32 | 189 | 229 |
| A0A0D3QXV2 | 190 | 230 |
| CmaCh17G013880.1 | 191 | 231 |
| A0A1S3CBF6 | 192 | 232 |
| CocGraCDS4 | 193 | 233 |
| CocGraCDS6_m | 194 | 234 |
| CSPI06G07180.1 | 195 | 235 |
| CucFoeCDS | 196 | 236 |
| CucMelMakCDS5 | 197 | 237 |
| CucMetCDS | 198 | 238 |
| CucPepOviCDS1_m | 199 | 239 |
| CucPepOviCDS2 | 200 | 240 |
| CucPepOviCDS3 | 201 | 241 |
| CucPepOviCDS3_m | 202 | 242 |
| Cucsa.349060.1 | 203 | 243 |
| F6GYI4 | 204 | 244 |
| GynCarCDS1 | 205 | 245 |
| GynCarCDS4 | 206 | 246 |
| K7NBZ9 | 207 | 247 |
| LagSicCDS2_m | 208 | 248 |
| Lus10014538.g_m | 209 | 249 |
| Lus10032146.g_m | 210 | 250 |
| MomChaCDS2 | 211 | 251 |
| MomChaCDS4 | 212 | 252 |
| O23909_PEA_Y118L | 213 | 253 |
| Q6BE24 | 214 | 254 |
| SecEduCDS | 215 | 255 |
| SgCDS1 | 216 | 256 |
| SgCDS1 | 332 | 256 |
| SgCDS_Scer1 | 217 | 257 |
| TriKirCDS10 | 218 | 258 |
| TriKirCDS4 | 219 | 259 |
| XP_006340479.1 | 220 | 260 |
| XP_008655662.1 | 221 | 261 |
| XP_010541955.1_m | 222 | 262 |
| XP_016688836.1_m | 223 | 263 |

TABLE 13
Non-Limiting Examples of C11 Hydroxylases (P450s),
Cytochrome P450 Reductases, Epoxide Hydrolases
(EPHs), and Squalene Epoxidases

| | Nucleotide | Protein |
|---|---|---|
| Enzyme | SEQ ID NO | SEQ ID NO |
| C11 hydroxylase | 264 | 280 |
| C11 hydroxylase (cucurbitadienol oxidase) | 265 | 281 |
| Cytochrome P450 reductase | 266 | 282 |
| Cytochrome P450 reductase | 267 | 283 |
| Epoxide hydrolase | 268 | 284 |
| Epoxide hydrolase | 269 | 285 |
| Epoxide hydrolase (epoxide hydratase) | 270 | 286 |
| Epoxide hydrolase (epoxide hydratase) | 271 | 287 |
| Epoxide hydrolase (epoxide hydratase) | 272 | 288 |
| Epoxide hydrolase (epoxide hydratase) | 273 | 289 |
| Epoxide hydrolase (epoxide hydratase) | 274 | 290 |
| Epoxide hydrolase (epoxide hydratase) | 275 | 291 |
| Epoxide hydrolase (epoxide hydratase) | 276 | 292 |
| Squalene epoxidase | 277 | 293 |
| Squalene epoxidase | 278 | 294 |
| Squalene epoxidase | 279 | 295 |

TABLE 14
Sequences of Additional Enzymes Associated with the Disclosure

| | Nucleotide | Protein |
|---|---|---|
| Name | SEQ ID NO | SEQ ID NO |
| CYP1798 | 296 | 305 |
| AtCPR1 | 297 | 306 |
| CPR4497 | 298 | 307 |
| sgCDS | 299 | 308 |
| EPH3 | 300 | 309 |
| atEPH2 | 301 | 310 |
| ERG9 | 302 | 311 |
| ERG1 | 303 | 312 |
| ERG7 | 304 | 313 |
| CYP5491 | 314 | 315 |

### EQUIVALENTS

[0265] Those skilled in the art will recognize or be able to ascertain using no more than routine experimentation many equivalents to the specific embodiments of the invention described in this application. Such equivalents are intended to be encompassed by the following claims.

[0266] All references, including patent documents, disclosed in this application are incorporated by reference in their entirety, particularly for the disclosure referenced in this application.

1. A host cell for producing mogrol, one or more mogrol precursors, and/or one or more mogrosides, wherein the host cell comprises a heterologous polynucleotide encoding a lanosterol synthase with reduced activity as compared to a wild-type lanosterol synthase, wherein the host cell is capable of producing:
(a) one or more mogrol precursors selected from the group consisting of: squalene, 2-3-oxidosqualene, 2,3,22,23-dioxidosqualene, cucurbitadienol, 24, 25-expoxycucurbitadienol, 11-hydroxycucurbitadienol, 11-hydroxy-24,25-epoxycucurbitadienol, 11-hydroxycucurbitadienol, 11-oxo-cucurbitadienol, and 24,25-dihydroxycucurbitadienol;
(b) mogrol; and/or
(c) one or more mogrosides.

2. The host cell of claim 1, wherein the host cell comprises a heterologous polynucleotide encoding a lanosterol synthase, wherein the lanosterol synthase comprises an amino acid substitution or deletion relative to SEQ ID NO: 1 at one or more residues corresponding to position 14, 33, 47, 50, 66, 80, 83, 85, 92, 94, 107, 122, 132, 145, 158, 170, 172, 184, 193, 197, 198, 212, 213, 227, 228, 231, 235, 248, 249, 260, 282, 286, 287, 289, 295, 296, 309, 314, 316, 329, 344, 360, 370, 371, 372, 398, 407, 414, 417, 423, 432, 437, 442, 444, 452, 474, 479, 491, 498, 515, 526, 529, 536, 544, 552, 559, 560, 564, 578, 586, 608, 610, 617, 619, 620, 631, 638, 650, 655, 660, 679, 686, 702, 710, 726, 736, 738, and/or 742 in SEQ ID NO: 1

3. The host cell of claim 1 or 2, wherein the lanosterol synthase comprises 2, 3, 4, 5, 6, 7, 8, 9, 10, 11, or 12 amino acid substitutions and/or deletions relative to SEQ ID NO: 1.

4. The host cell of any one of claims 1-3, wherein the lanosterol synthase comprises:
a) the amino acid Y at the residue corresponding to position 14 in SEQ ID NO:1;
b) the amino acid Q at the residue corresponding to position 33 in SEQ ID NO:1;
c) the amino acid E at the residue corresponding to position 47 in SEQ ID NO:1;
d) the amino acid G at the residue corresponding to position 50 in SEQ ID NO:1;
e) the amino acid R at the residue corresponding to position 66 in SEQ ID NO:1;
f) the amino acid G at the residue corresponding to position 80 in SEQ ID NO: 1;
g) the amino acid L at the residue corresponding to position 83 in SEQ ID NO: 1;
h) the amino acid N at the residue corresponding to position 85 in SEQ ID NO:1;
i) the amino acid I at the residue corresponding to position 92 in SEQ ID NO:1;
j) the amino acid S at the residue corresponding to position 94 in SEQ ID NO:1;
k) the amino acid D at the residue corresponding to position 107 in SEQ ID NO:1;
l) the amino acid C at the residue corresponding to position 122 in SEQ ID NO:1;
m) the amino acid S at the residue corresponding to position 132 in SEQ ID NO:1;
n) the amino acid C at the residue corresponding to position 145 in SEQ ID NO:1;
o) the amino acid S at the residue corresponding to position 158 in SEQ ID NO:1;
p) the amino acid A at the residue corresponding to position 170 in SEQ ID NO: 1;
q) the amino acid N at the residue corresponding to position 172 in SEQ ID NO:1;
r) the amino acid W at the residue corresponding to position 184 in SEQ ID NO:1;
s) the amino acid C or H at the residue corresponding to position 193 in SEQ ID NO:1;
t) the amino acid V at the residue corresponding to position 197 in SEQ ID NO:1;
u) the amino acid I at the residue corresponding to position 198 in SEQ ID NO: 1;
v) the amino acid I at the residue corresponding to position 212 in SEQ ID NO:1;
w) the amino acid L at the residue corresponding to position 213 in SEQ ID NO:1;
x) the amino acid L at the residue corresponding to position 227 in SEQ ID NO:1;
y) the amino acid T at the residue corresponding to position 228 in SEQ ID NO: 1;
z) the amino acid V at the residue corresponding to position 231 in SEQ ID NO:1;
aa) the amino acid M at the residue corresponding to position 235 in SEQ ID NO:1;
bb) the amino acid F at the residue corresponding to position 248 in SEQ ID NO:1;
cc) the amino acid L at the residue corresponding to position 249 in SEQ ID NO:1;
dd) the amino acid R at the residue corresponding to position 260 in SEQ ID NO:1;
cc) the amino acid I at the residue corresponding to position 282 in SEQ ID NO:1;
ff) the amino acid F at the residue corresponding to position 286 in SEQ ID NO: 1;
gg) the amino acid G at the residue corresponding to position 287 in SEQ ID NO:1;
hh) the amino acid G at the residue corresponding to position 289 in SEQ ID NO: 1;
ii) the amino acid I at the residue corresponding to position 295 in SEQ ID NO: 1;
jj) the amino acid T at the residue corresponding to position 296 in SEQ ID NO: 1;
kk) the amino acid F at the residue corresponding to position 309 in SEQ ID NO: 1;
ll) the amino acid S at the residue corresponding to position 314 in SEQ ID NO:1;
mm) the amino acid R at the residue corresponding to position 316 in SEQ ID NO:1;
nn) the amino acid N at the residue corresponding to position 329 in SEQ ID NO:1;
oo) the amino acid A at the residue corresponding to position 344 in SEQ ID NO: 1;
pp) the amino acid S at the residue corresponding to position 360 in SEQ ID NO:1;
qq) the amino acid L at the residue corresponding to position 370 in SEQ ID NO:1;
rr) the amino acid V at the residue corresponding to position 371 in SEQ ID NO:1;
ss) the amino acid P at the residue corresponding to position 372 in SEQ ID NO:1;
tt) the amino acid I at the residue corresponding to position 398 in SEQ ID NO: 1;
uu) the amino acid V at the residue corresponding to position 407 in SEQ ID NO:1;
vv) the amino acid S at the residue corresponding to position 414 in SEQ ID NO:1;
ww) the amino acid S at the residue corresponding to position 417 in SEQ ID NO:1;
xx) the amino acid L at the residue corresponding to position 423 in SEQ ID NO:1;
yy) the amino acid I or S at the residue corresponding to position 432 in SEQ ID NO:1;
zz) the amino acid L at the residue corresponding to position 437 in SEQ ID NO:1;
aaa) the amino acid V at the residue corresponding to position 442 in SEQ ID NO:1;
bbb) the amino acid M or S at the residue corresponding to position 444 in SEQ ID NO:1;
ccc) the amino acid G at the residue corresponding to position 452 in SEQ ID NO:1;
ddd) the amino acid V at the residue corresponding to position 474 in SEQ ID NO:1;
ccc) the amino acid S at the residue corresponding to position 479 in SEQ ID NO:1;
fff) the amino acid Q at the residue corresponding to position 491 in SEQ ID NO:1;
ggg) the amino acid N at the residue corresponding to position 498 in SEQ ID NO: 1;
hhh) the amino acid L at the residue corresponding to position 515 in SEQ ID NO:1;
iii) the amino acid T at the residue corresponding to position 526 in SEQ ID NO:1;
jjj) the amino acid T at the residue corresponding to position 529 in SEQ ID NO:1;
kkk) the amino acid F at the residue corresponding to position 536 in SEQ ID NO:1;
lll) the amino acid Y at the residue corresponding to position 544 in SEQ ID NO:1;
mmm) the amino acid E at the residue corresponding to position 552 in SEQ ID NO:1;
nnn) the amino acid A at the residue corresponding to position 559 in SEQ ID NO:1;
ooo) the amino acid M at the residue corresponding to position 560 in SEQ ID NO:1;
ppp) the amino acid C or N at the residue corresponding to position 564 in SEQ ID NO:1;
qqq) the amino acid P at the residue corresponding to position 578 in SEQ ID NO:1;
rrr) the amino acid F at the residue corresponding to position 586 in SEQ ID NO:1;
sss) the amino acid T at the residue corresponding to position 608 in SEQ ID NO:1;
ttt) the amino acid I at the residue corresponding to position 610 in SEQ ID NO: 1;
uuu) the amino acid V at the residue corresponding to position 617 in SEQ ID NO:1;
vvv) the amino acid L at the residue corresponding to position 619 in SEQ ID NO:1;
www) the amino acid S at the residue corresponding to position 620 in SEQ ID NO:1;
xxx) the amino acid E or R at the residue corresponding to position 631 in SEQ ID NO:1;
yyy) the amino acid D at the residue corresponding to position 638 in SEQ ID NO:1;
zzz) the amino acid L at the residue corresponding to position 650 in SEQ ID NO:1;
aaaa) the amino acid A at the residue corresponding to position 655 in SEQ ID NO:1;
bbbb) the amino acid H at the residue corresponding to position 660 in SEQ ID NO:1;
cccc) the amino acid S at the residue corresponding to position 679 in SEQ ID NO:1;
dddd) the amino acid E at the residue corresponding to position 686 in SEQ ID NO: 1;
eeee) the amino acid D at the residue corresponding to position 702 in SEQ ID NO:1;
ffff) the amino acid Q at the residue corresponding to position 710 in SEQ ID NO:1;
gggg) the amino acid L or V at the residue corresponding to position 726 in SEQ ID NO:1;
hhhh) the amino acid F at the residue corresponding to position 736 in SEQ ID NO:1;
iiii) the amino acid M at the residue corresponding to position 738 in SEQ ID NO:1; and/or
jjjj) a truncation that results in deletion of the residue corresponding to position 742 in SEQ ID NO: 1.

5. The host cell of any one of claims 1-4, wherein the lanosterol synthase comprises the amino acid substitution E617V, G107D, and/or K631E relative to SEQ ID NO: 1.

6. The host cell of any one of claims 1-4, wherein relative to SEQ ID NO: 1, the lanosterol synthase comprises:
a) R33Q, R193C, D289G, N295I, S296T, N620S, and Y736F;
b) R184W, L235M, L260R, and E710Q;
c) K47E, L92I, T360S, S372P, T444M, and R578P;
d) D50G, K66R, N94S, G417S, E617V, and F726L;
e) N14Y, N132S, Y145C, R193H, I286F, L316R, F432I, E442V, T444S, I479S, K631R, and T655A;
f) F432S, D452G, and I536F;
g) E287G, K329N, E617V, and F726V;
h) E231V, A407V, Q423L, A529T, and Y564C;
i) V248F, D371V, and G702D;
j) L197V, K282I, N314S, P370L, A608T, G638D, and F650L;
k) L491Q, Y586F, and R660H;
l) G122C, H249L, and K738M;
m) P227L, E474V, V559A, and Y564N;
n) K85N, G158S, S515L, P526T, Q619L, and a truncation resulting in a deletion of the residue corresponding to Q742 in SEQ ID NO: 1;
o) G107D and K631E;
p) T212I, W213L, N544Y, and V552E;
q) I172N, C414S, L560M, and G679S;
r) R193C, D289G, N295I, S296T, N620S, and Y736F;
s) K85N and G158S;
t) L197V, K282I, N314S, and P370L;
u) I172N, C414S, and L560M;
v) D371V, M610I, and G702D;
w) D371V, K498N, M610I, and G702D;
x) D80G, P83L, T170A, T198I, and A228T;
y) T360S, S372P, T444M, and R578P;
z) D50G, K66R, N94S, G417S, and E617V; or
aa) L309F, V344A, T398I, and K686E.

7. The host cell of any one of claims 1-4, wherein relative to SEQ ID NO: 1, the lanosterol synthase comprises the following amino acid substitutions:
(a) R193C, D289G, N295I, S296T, N620S, and Y736F;
(b) F432S, D452G, and I536F;
(c) K85N and G158S;
(d) L197V, K282I, N314S, and P370L;
(e) I172N, C414S, L560M, and G679S;
(f) I172N, C414S, and L560M;
(g) D371V, M610I, and G702D;
(h) D371V, K498N, M610I, and G702D;
(i) D80G, P83L, T170A, T198I, and A228T;
(j) D50G, K66R, N94S, G417S, E617V, and F726L;
(k) T360S, S372P, T444M, and R578P;
(l) D50G, K66R, N94S, G417S, and E617V; and
(m) L309F, V344A, T398I, and K686E.

8. The host cell of any one of claims 1-4, wherein relative to SEQ ID NO: 1, the lanosterol synthase comprises the following amino acid substitutions:
(a) D50G, K66R, N94S, G417S, E617V, and F726L;
(b) K85N and G158S;
(c) K47E, L92I, T360S, S372P, T444M, and R578P;
(d) F432S, D452G, and I536F;
(e) T360S, S372P, T444M, and R578P;
(f) L491Q, Y586F, and R660H;
(g) K85N, G158S, S515L, P526T, Q619L, and a truncation that results in deletion of the residue corresponding to position 742 in SEQ ID NO: 1; or
(h) I172N, C414S, L560M, and G679S.

9. The host cell of any one of claims 1-4, wherein the lanosterol synthase comprises an amino acid substitution or deletion relative to SEQ ID NO: 1 at one or more residues corresponding to position 14, 33, 47, 50, 66, 85, 92, 94, 122, 132, 145, 158, 193, 231, 248, 249, 286, 287, 289, 295, 296, 316, 329, 360, 371, 372, 407, 417, 423, 432, 442, 444, 479, 515, 526, 529, 564, 578, 617, 619, 620, 631, 655, 702, 726, 736, 738, and/or 742 in SEQ ID NO: 1.

10. The host cell of any one of claims 1-4 and 9, wherein the lanosterol synthase comprises relative to SEQ ID NO: 1:
a) R33Q, R193C, D289G, N295I, S296T, N620S, and Y736F;
b) K47E, L92I, T360S, S372P, T444M, and R578P;
c) D50G, K66R, N94S, G417S, E617V, and F726L;
d) N14Y, N132S, Y145C, R193H, I286F, L316R, F432I, E442V, T444S, I479S, K631R, and T655A;
e) E287G, K329N, E617V, and F726V;
f) E231V, A407V, Q423L, A529T, and Y564C;
g) V248F, D371V, and G702D;
h) G122C, H249L, and K738M; or
i) K85N, G158S, S515L, P526T, and Q619L, and a truncation resulting in a deletion of the residue corresponding to Q742 in SEQ ID NO: 1.

11. The host cell of any one of claims 1-10, wherein the lanosterol synthase comprises a sequence that is at least 90% identical to SEQ ID NO: 3, 83-87, 89-92, 94-95, 99, 118-120, 316-319, 321-326, 329, or 331.

12. The host cell of claim 11, wherein the lanosterol synthase comprises SEQ ID NO: 3, 83-87, 89-92, 94-95, 99, 118-120, 316-319, 321-326, 329, or 331.

13. The host cell of any one of claims 1-12, wherein the heterologous polynucleotide comprises a sequence that is at least 90% identical to SEQ ID NO: 4, 62-66, 68-71, 73-74, 78, 103-109, 111-117, 328, or 330.

14. The host cell of claim 13, wherein the heterologous polynucleotide comprises the sequence of SEQ ID NO: 4, 62-66, 68-71, 73-74, 78, 103-109, 111-117, 328, or 330.

15. A host cell that comprises a heterologous polynucleotide encoding a lanosterol synthase, wherein the lanosterol synthase comprises a sequence that is at least 90% identical to SEQ ID NO: 3, 83-87, 89-92, 94-95, 99, 100-102, 118-120, 316-319, 321-326, 329, or 331.

16. The host cell of claim 15, wherein the lanosterol synthase comprises SEQ ID NO: 3, 83-87, 89-92, 94-95, 99, 100-102, 118-120, 316-319, 321-326, 329, or 331.

17. A host cell that comprises a heterologous polynucleotide encoding a lanosterol synthase, wherein the lanosterol synthase comprises relative to SEQ ID NO: 1:
a) R33Q, R193C, D289G, N295I, S296T, N620S, and Y736F;
b) K47E, L92I, T360S, S372P, T444M, and R578P;
c) D50G, K66R, N94S, G417S, E617V, and F726L;
d) N14Y, N132S, Y145C, R193H, I286F, L316R, F432I, E442V, T444S, I479S, K631R, and T655A;
e) E287G, K329N, E617V, and F726V;
f) E231V, A407V, Q423L, A529T, and Y564C;
g) V248F, D371V, and G702D;
h) G122C, H249L, and K738M; or
i) K85N, G158S, S515L, P526T, and Q619L, and a truncation resulting in a deletion of the residue corresponding to Q742 in SEQ ID NO: 1.

18. A host cell that comprises a heterologous polynucleotide encoding a lanosterol synthase, wherein the heterologous polynucleotide comprises a sequence that is at least 90% identical to SEQ ID NO: 4, 62-66, 68-71, 73-74, 78, 80-82, 103-109, 111-117, 328, or 330.

19. The host cell of claim 18, wherein the heterologous polynucleotide comprises SEQ ID NO: 4, 62-66, 68-71, 73-74, 78, 80-82, 103-109, 111-117, 328, or 330.

20. The host cell of claim 1, wherein the host cell comprises a heterologous polynucleotide encoding a lanosterol synthase, wherein the lanosterol synthase comprises an amino acid substitution or deletion relative to SEQ ID NO: 313 at one or more residues corresponding to position 64, 120, 121, 136, 226, 268, 275, 281, 300, 322, 333, 438, 502, 604, 619, 628, 656, 693, 726, 727, 728, 729, 730, and/or 731.

21. The host cell of claim 20, wherein the lanosterol synthase comprises:
(a) the amino acid G at the residue corresponding to position 64 in SEQ ID NO: 313;
(b) the amino acid V at the residue corresponding to position 120 in SEQ ID NO: 313;
(c) the amino acid S at the residue corresponding to position 121 in SEQ ID NO: 313;
(d) the amino acid V at the residue corresponding to position 136 in SEQ ID NO: 313;
(e) the amino acid I at the residue corresponding to position 226 in SEQ ID NO: 313;
(f) the amino acid S at the residue corresponding to position 268 in SEQ ID NO: 313;
(g) the amino acid I at the residue corresponding to position 275 in SEQ ID NO: 313;
(h) the amino acid A at the residue corresponding to position 281 in SEQ ID NO: 313;
(i) the amino acid G at the residue corresponding to position 300 in SEQ ID NO: 313;
(j) the amino acid G at the residue corresponding to position 322 in SEQ ID NO: 313;
(k) the amino acid A at the residue corresponding to position 333 in SEQ ID NO: 313;
(l) the amino acid E at the residue corresponding to position 438 in SEQ ID NO: 313;
(m) the amino acid L at the residue corresponding to position 502 in SEQ ID NO: 313;
(n) the amino acid N at the residue corresponding to position 604 in SEQ ID NO: 313;
(o) the amino acid S at the residue corresponding to position 619 in SEQ ID NO: 313;
(p) the amino acid E at the residue corresponding to position 628 in SEQ ID NO: 313;
(q) the amino acid T at the residue corresponding to position 656 in SEQ ID NO: 313;
(r) the amino acid G at the residue corresponding to position 693 in SEQ ID NO: 313; and/or
(s) deletion of residues corresponding to positions 726-731 in SEQ ID NO: 313.

22. The host cell of any one of claims 1, 20 and 21, wherein the lanosterol synthase comprises relative to SEQ ID NO: 313:
(a) P121S, A136V, S300G, V322G, K438E, F502L, K628E, and deletion of residues corresponding to positions 726-731 in SEQ ID NO: 313;
(b) K268S, T281A, F502L, T604N, A656T, and E693G; or
(c) C619S, F275I, I120V, M226I, R64G, and T333A.

23. The host cell of any one of claims 1 and 20-22, wherein the lanosterol synthase comprises a sequence that is at least 90% identical to any one of SEQ ID NOs: 100-102.

24. The host cell of claim 23, wherein the lanosterol synthase comprises a sequence selected from SEQ ID NOs: 100-102.

25. The host of any one of claims 1 and 20-24, wherein the heterologous polynucleotide encoding the lanosterol synthase comprises a sequence that is at least 90% identical to a sequence selected from SEQ ID NOs: 80-82.

26. The host cell of claim 25, wherein the heterologous polynucleotide encoding the lanosterol synthase comprises a sequence selected from SEQ ID NOs: 80-82.

27. The host cell of any one of claims 1-26, wherein the host cell is capable of producing mevalonate.

28. The host cell of any one of claims 1-27, wherein the host cell is capable of producing at least 0.2 g/L mevalonate.

29. The host cell of any one of claims 1-28, wherein the host cell is capable of producing at least 0.7 g/L mevalonate.

30. The host cell of any one of claims 1-29, wherein the host cell is capable of producing at least 9 mg/L cucurbitadienol.

31. The host cell of any one of claims 1-30, wherein the host cell is capable of producing at least 1.1 fold more cucurbitadienol than a control host cell comprising SEQ ID NO: 1 and/or a control host cell comprising SEQ ID NO: 313.

32. The host cell of any one of claims 1-31, wherein the host cell is capable of producing at least 3 fold more cucurbitadienol than a control host cell comprising SEQ ID NO: 1 and/or a control host cell comprising SEQ ID NO: 313.

33. The host cell of any one of claims 1-32, wherein the host cell is capable of producing at most 200 mg/L lanosterol.

34. The host cell of any one of claims 1-33, wherein the host cell is capable of producing at least 5 mg/L oxidosqualene.

35. The host cell of any one of claims 1-34, wherein the host cell is capable of producing more mevalonate than a control host cell that does not comprise the heterologous polynucleotide.

36. The host cell of any one of claims 1-35, wherein the host cell further comprises one or more heterologous polynucleotides encoding one or more of: a UDP-glycosyltransferases (UGT) enzyme, a cucurbitadienol synthase (CDS) enzyme, a C11 hydroxylase, an epoxide hydrolase (EPH), and squalene epoxidase (SQE).

37. The host cell of claim 36, wherein the UGT enzyme comprises a sequence that is at least 90% identical to SEQ ID NO: 121.

38. The host cell of claim 36 or 37, wherein the CDS enzyme comprises a sequence that is at least 90% identical to any one of SEQ ID NOs: 226, SEQ ID NO: 235, SEQ ID NO: 232, and SEQ ID NO: 256.

39. The host cell of any one of claims 36-38, wherein the C11 hydroxylase comprises a sequence that is at least 90% identical to any one of SEQ ID NOs: 280-281, 305, and 315.

40. The host cell of any one of claims 36-39, wherein the EPH comprises a sequence that is at least 90% identical to any one of SEQ ID NO: 284-292 and 309-310.

41. The host cell of any one of claims 36-40, wherein the SQE comprises a sequence that is at least 90% identical to any one of SEQ ID NOs: 293-295 and 312.

42. The host cell of any one of claims 1-41, wherein the host cell further comprises a heterologous polynucleotide encoding a cytochrome P450 reductase.

43. The host cell of claim 42, wherein the cytochrome P450 reductase comprises a sequence that is at least 90% identical to any one of SEQ ID NOs: 282-283 and 306-307.

44. The host cell of any one of claims 1-41, wherein the host cell further comprises a heterologous polynucleotide encoding a cytochrome P450 reductase with reduced activity as compared to a control cytochrome P450 reductase or a heterologous polynucleotide that reduces cytochrome P450 activity.

45. The host cell of claim 44, wherein the control cytochrome P450 reductase is a wild-type P450 reductase.

46. The host cell of any one of claims 1-45, wherein the host cell is a yeast cell, a plant cell, or a bacterial cell.

47. The host cell of claim 46, wherein the host cell is a yeast cell.

48. The host cell of claim 47, wherein the yeast cell is a Saccharomyces cerevisiae cell.

49. The host cell of claim 47, wherein the yeast cell is a Yarrowia lipolytica cell.

50. The host cell of claim 46, wherein the host cell is a bacterial cell.

51. The host cell of claim 50, wherein the bacterial cell is an E. coli cell.

52. A method of producing a mogroside comprising culturing the host cell of any one of claims 1-51.

53. A method of producing mogrol comprising culturing the host cell of any one of claims 1-51.

54. The method of claim 52, wherein the mogroside is selected from mogroside I-A1 (MIA1), mogroside IE (MIE), mogroside II-A1 (MIIA1), mogroside II-A2 (MIIA2), mogroside III-A1 (MIIIA1), mogroside II-E (MIIE), mogroside III (MIII), siamenoside I, mogroside IV (MIV), mogroside IVa (MIVA), isomogroside IV, mogroside III-E (MIIIE), mogroside V (MV), mogroside VIA (MVIA), mogroside VIB (MVIB), isomogroside V, mogroside VIa1 (MVIa1), and/or mogroside VI (MVI).

55. The host cell of any one of claims 1-51, wherein the one or more mogrosides is selected from mogroside I-A1 (MIA1), mogroside IE (MIE), mogroside II-A1 (MIIA1), mogroside II-A2 (MIIA2), mogroside III-A1 (MIIIA1), mogroside II-E (MIIE), mogroside III (MIII), siamenoside I, mogroside IV (MIV), mogroside IVa (MIVA), isomogroside IV, mogroside III-E (MIIIE), mogroside V (MV), mogroside VIA (MVIA), mogroside VIB (MVIB), isomogroside V, mogroside VIa1 (MVIa1), and/or mogroside VI (MVI).

56. The host cell of any one of claims 1-51 and 55, further comprising a heterologous polynucleotide encoding an acetoacetyl COA synthase.

57. The host cell of claim 56, wherein the acetoacetyl COA synthase comprises a sequence that is at least 90% identical to SEQ ID NO: 6.

58. The host cell of claim 57, wherein the heterologous polynucleotide encoding the acetoacetyl COA synthase comprises a sequence that is at least 90% identical to SEQ ID NO: 7.

59. A method of producing mogrol, one or more mogrol precursors, and/or one or more mogrosides comprising culturing a host cell that comprises a heterologous polynucleotide encoding a lanosterol synthase, wherein the lanosterol synthase comprises an amino acid substitution or deletion relative to SEQ ID NO: 1 at one or more residues corresponding to position 14, 33, 47, 50, 66, 80, 83, 85, 92, 94, 107, 122, 132, 145, 158, 170, 172, 184, 193, 197, 198, 212, 213, 227, 228, 231, 235, 248, 249, 260, 282, 286, 287, 289, 295, 296, 309, 314, 316, 329, 344, 360, 370, 371, 372, 398, 407, 414, 417, 423, 432, 437, 442, 444, 452, 474, 479, 491, 498, 515, 526, 529, 536, 544, 552, 559, 560, 564, 578, 586, 608, 610, 617, 619, 620, 631, 638, 650, 655, 660, 679, 686, 702, 710, 726, 736, 738, and/or 742 in SEQ ID NO: 1 and wherein the host cell is capable of producing:
(a) one or more mogrol precursors selected from the group consisting of: squalene, 2-3-oxidosqualene, 2,3,22,23-dioxidosqualene, cucurbitadienol, 24, 25-expoxycucurbitadienol, 11-hydroxycucurbitadienol, 11-hydroxy-24,25-epoxycucurbitadienol, 11-hydroxycucurbitadienol, 11-oxo-cucurbitadienol, and 24,25-dihydroxycucurbitadienol;
(b) mogrol; and/or
(c) one or more mogrosides.

60. The method of claim 59, wherein the lanosterol synthase comprises 2, 3, 4, 5, 6, 7, 8, 9, 10, 11, or 12 amino acid substitutions and/or deletions relative to SEQ ID NO: 1.

61. The method of claim 59 or 60, wherein the lanosterol synthase comprises:
a) the amino acid Y at the residue corresponding to position 14 in SEQ ID NO:1;
b) the amino acid Q at the residue corresponding to position 33 in SEQ ID NO:1;
c) the amino acid E at the residue corresponding to position 47 in SEQ ID NO:1;
d) the amino acid G at the residue corresponding to position 50 in SEQ ID NO:1;
e) the amino acid R at the residue corresponding to position 66 in SEQ ID NO:1;
f) the amino acid G at the residue corresponding to position 80 in SEQ ID NO: 1;
g) the amino acid L at the residue corresponding to position 83 in SEQ ID NO: 1;
h) the amino acid N at the residue corresponding to position 85 in SEQ ID NO:1;
i) the amino acid I at the residue corresponding to position 92 in SEQ ID NO:1;
j) the amino acid S at the residue corresponding to position 94 in SEQ ID NO:1;
k) the amino acid D at the residue corresponding to position 107 in SEQ ID NO:1;
l) the amino acid C at the residue corresponding to position 122 in SEQ ID NO:1;
m) the amino acid S at the residue corresponding to position 132 in SEQ ID NO:1;
n) the amino acid C at the residue corresponding to position 145 in SEQ ID NO:1;
o) the amino acid S at the residue corresponding to position 158 in SEQ ID NO:1;
p) the amino acid A at the residue corresponding to position 170 in SEQ ID NO: 1;
q) the amino acid N at the residue corresponding to position 172 in SEQ ID NO:1;
r) the amino acid W at the residue corresponding to position 184 in SEQ ID NO:1;
s) the amino acid C or H at the residue corresponding to position 193 in SEQ ID NO:1;
t) the amino acid V at the residue corresponding to position 197 in SEQ ID NO:1;
u) the amino acid I at the residue corresponding to position 198 in SEQ ID NO: 1;
v) the amino acid I at the residue corresponding to position 212 in SEQ ID NO:1;
w) the amino acid L at the residue corresponding to position 213 in SEQ ID NO:1;
x) the amino acid L at the residue corresponding to position 227 in SEQ ID NO:1;
y) the amino acid T at the residue corresponding to position 228 in SEQ ID NO: 1;
z) the amino acid V at the residue corresponding to position 231 in SEQ ID NO:1;
aa) the amino acid M at the residue corresponding to position 235 in SEQ ID NO:1;
bb) the amino acid F at the residue corresponding to position 248 in SEQ ID NO:1;
cc) the amino acid L at the residue corresponding to position 249 in SEQ ID NO:1;
dd) the amino acid R at the residue corresponding to position 260 in SEQ ID NO:1;
cc) the amino acid I at the residue corresponding to position 282 in SEQ ID NO:1;
ff) the amino acid F at the residue corresponding to position 286 in SEQ ID NO: 1;
gg) the amino acid G at the residue corresponding to position 287 in SEQ ID NO:1;
hh) the amino acid G at the residue corresponding to position 289 in SEQ ID NO: 1;
ii) the amino acid I at the residue corresponding to position 295 in SEQ ID NO: 1;
jj) the amino acid T at the residue corresponding to position 296 in SEQ ID NO: 1;
kk) the amino acid F at the residue corresponding to position 309 in SEQ ID NO: 1;
ll) the amino acid S at the residue corresponding to position 314 in SEQ ID NO:1;
mm) the amino acid R at the residue corresponding to position 316 in SEQ ID NO:1;
nn) the amino acid N at the residue corresponding to position 329 in SEQ ID NO:1;
oo) the amino acid A at the residue corresponding to position 344 in SEQ ID NO: 1;
pp) the amino acid S at the residue corresponding to position 360 in SEQ ID NO:1;
qq) the amino acid L at the residue corresponding to position 370 in SEQ ID NO:1;
rr) the amino acid V at the residue corresponding to position 371 in SEQ ID NO:1;
ss) the amino acid P at the residue corresponding to position 372 in SEQ ID NO:1;
tt) the amino acid I at the residue corresponding to position 398 in SEQ ID NO: 1;
uu) the amino acid V at the residue corresponding to position 407 in SEQ ID NO:1;
vv) the amino acid S at the residue corresponding to position 414 in SEQ ID NO:1;
ww) the amino acid S at the residue corresponding to position 417 in SEQ ID NO:1;
xx) the amino acid L at the residue corresponding to position 423 in SEQ ID NO:1;
yy) the amino acid I or S at the residue corresponding to position 432 in SEQ ID NO:1;
zz) the amino acid L at the residue corresponding to position 437 in SEQ ID NO:1;
aaa) the amino acid V at the residue corresponding to position 442 in SEQ ID NO:1;
bbb) the amino acid M or S at the residue corresponding to position 444 in SEQ ID NO:1;
ccc) the amino acid G at the residue corresponding to position 452 in SEQ ID NO:1;
ddd) the amino acid V at the residue corresponding to position 474 in SEQ ID NO:1;
ccc) the amino acid S at the residue corresponding to position 479 in SEQ ID NO:1;
fff) the amino acid Q at the residue corresponding to position 491 in SEQ ID NO:1;
ggg) the amino acid N at the residue corresponding to position 498 in SEQ ID NO: 1;
hhh) the amino acid L at the residue corresponding to position 515 in SEQ ID NO:1;
iii) the amino acid T at the residue corresponding to position 526 in SEQ ID NO:1;
jjj) the amino acid T at the residue corresponding to position 529 in SEQ ID NO:1;
kkk) the amino acid F at the residue corresponding to position 536 in SEQ ID NO:1;
lll) the amino acid Y at the residue corresponding to position 544 in SEQ ID NO:1;
mmm) the amino acid E at the residue corresponding to position 552 in SEQ ID NO:1;
nnn) the amino acid A at the residue corresponding to position 559 in SEQ ID NO:1;
ooo) the amino acid M at the residue corresponding to position 560 in SEQ ID NO:1;
ppp) the amino acid C or N at the residue corresponding to position 564 in SEQ ID NO:1;
qqq) the amino acid P at the residue corresponding to position 578 in SEQ ID NO:1;
rrr) the amino acid F at the residue corresponding to position 586 in SEQ ID NO:1;
sss) the amino acid T at the residue corresponding to position 608 in SEQ ID NO:1;
ttt) the amino acid I at the residue corresponding to position 610 in SEQ ID NO: 1;
uuu) the amino acid V at the residue corresponding to position 617 in SEQ ID NO:1;
vvv) the amino acid L at the residue corresponding to position 619 in SEQ ID NO:1;
www) the amino acid S at the residue corresponding to position 620 in SEQ ID NO:1;
xxx) the amino acid E or R at the residue corresponding to position 631 in SEQ ID NO:1;
yyy) the amino acid D at the residue corresponding to position 638 in SEQ ID NO:1;
zzz) the amino acid L at the residue corresponding to position 650 in SEQ ID NO:1;
aaaa) the amino acid A at the residue corresponding to position 655 in SEQ ID NO:1;
bbbb) the amino acid H at the residue corresponding to position 660 in SEQ ID NO:1;
cccc) the amino acid S at the residue corresponding to position 679 in SEQ ID NO:1;
dddd) the amino acid E at the residue corresponding to position 686 in SEQ ID NO: 1;
eeee) the amino acid D at the residue corresponding to position 702 in SEQ ID NO:1;
ffff) the amino acid Q at the residue corresponding to position 710 in SEQ ID NO:1;
gggg) the amino acid L or V at the residue corresponding to position 726 in SEQ ID NO:1;
hhhh) the amino acid F at the residue corresponding to position 736 in SEQ ID NO:1;
iiii) the amino acid M at the residue corresponding to position 738 in SEQ ID NO:1; and/or
jjjj) a truncation that results in deletion of the residue corresponding to position 742 in SEQ ID NO: 1.

62. The method of any one of claims 59-61, wherein the lanosterol synthase comprises the amino acid substitution E617V, G107D, and/or K631E relative to SEQ ID NO: 1.

63. The method of any one of claims 59-61, wherein relative to SEQ ID NO: 1, the lanosterol synthase comprises:
a) R33Q, R193C, D289G, N295I, S296T, N620S, and Y736F;
b) R184W, L235M, L260R, and E710Q;
c) K47E, L92I, T360S, S372P, T444M, and R578P;
d) D50G, K66R, N94S, G417S, E617V, and F726L;
e) N14Y, N132S, Y145C, R193H, I286F, L316R, F432I, E442V, T444S, I479S, K631R, and T655A;
f) F432S, D452G, and I536F;
g) E287G, K329N, E617V, and F726V;
h) E231V, A407V, Q423L, A529T, and Y564C;
i) V248F, D371V, and G702D;
j) L197V, K282I, N314S, P370L, A608T, G638D, and F650L;
k) L491Q, Y586F, and R660H;
l) G122C, H249L, and K738M;
m) P227L, E474V, V559A, and Y564N;
n) K85N, G158S, S515L, P526T, Q619L, and a truncation resulting in a deletion of the residue corresponding to Q742 in SEQ ID NO: 1;
o) G107D and K631E;
p) T212I, W213L, N544Y, and V552E;
q) I172N, C414S, L560M, and G679S;
r) R193C, D289G, N295I, S296T, N620S, and Y736F;
s) K85N and G158S;
t) L197V, K282I, N314S, and P370L;
u) I172N, C414S, and L560M;
v) D371V, M610I, and G702D;
w) D371V, K498N, M610I, and G702D;
x) D80G, P83L, T170A, T198I, and A228T;
y) T360S, S372P, T444M, and R578P;
z) D50G, K66R, N94S, G417S, and E617V; or
aa) L309F, V344A, T398I, and K686E.

64. The method of any one of claims 59-61 and 63, wherein relative to SEQ ID NO: 1, the lanosterol synthase comprises the following amino acid substitutions:
a) R193C, D289G, N295I, S296T, N620S, and Y736F;
b) F432S, D452G, and I536F;
c) K85N and G158S;
d) L197V, K282I, N314S, and P370L;
e) I172N, C414S, L560M, and G679S;
f) I172N, C414S, and L560M;
g) D371V, M610I, and G702D;
h) D371V, K498N, M610I, and G702D;
i) D80G, P83L, T170A, T198I, and A228T;
j) D50G, K66R, N94S, G417S, E617V, and F726L;
k) T360S, S372P, T444M, and R578P;
l) D50G, K66R, N94S, G417S, and E617V; and
m) L309F, V344A, T398I, and K686E.

65. The method of any one of claims 59-61 and 63, wherein relative to SEQ ID NO: 1, the lanosterol synthase comprises the following amino acid substitutions:
a) D50G, K66R, N94S, G417S, E617V, and F726L;
b) K85N and G158S;
c) K47E, L92I, T360S, S372P, T444M, and R578P;
d) F432S, D452G, and I536F;
e) T360S, S372P, T444M, and R578P;
f) L491Q, Y586F, and R660H;
g) K85N, G158S, S515L, P526T, Q619L, and a truncation that results in deletion of the residue corresponding to position 742 in SEQ ID NO: 1; or
h) I172N, C414S, L560M, and G679S.

66. The method of any one of claims 59-61, wherein the lanosterol synthase comprises an amino acid substitution or deletion relative to SEQ ID NO: 1 at one or more residues corresponding to position 14, 33, 47, 50, 66, 85, 92, 94, 122, 132, 145, 158, 193, 231, 248, 249, 286, 287, 289, 295, 296, 316, 329, 360, 371, 372, 407, 417, 423, 432, 442, 444, 479, 515, 526, 529, 564, 578, 617, 619, 620, 631, 655, 702, 726, 736, 738, and/or 742 in SEQ ID NO: 1.

67. The method of any one of claims 59-61 and 66, wherein the lanosterol synthase comprises relative to SEQ ID NO: 1:
a) R33Q, R193C, D289G, N295I, S296T, N620S, and Y736F;
b) K47E, L92I, T360S, S372P, T444M, and R578P;
c) D50G, K66R, N94S, G417S, E617V, and F726L;
d) N14Y, N132S, Y145C, R193H, I286F, L316R, F432I, E442V, T444S, I479S, K631R, and T655A;
e) E287G, K329N, E617V, and F726V;
f) E231V, A407V, Q423L, A529T, and Y564C;
g) V248F, D371V, and G702D;
h) G122C, H249L, and K738M; or
i) K85N, G158S, S515L, P526T, and Q619L, and a truncation resulting in a deletion of the residue corresponding to Q742 in SEQ ID NO: 1.

68. The method of any one of claims 59-65, wherein the lanosterol synthase comprises a sequence that is at least 90% identical to SEQ ID NO: 3, 83-87, 89-92, 94-95, 99, 118-120, 316-319, 321-326, 329, or 331.

69. The method of claim 68, wherein the lanosterol synthase comprises SEQ ID NO: 3, 83-87, 89-92, 94-95, 99, 118-120, 316-319, 321-326, 329, or 331.

70. The method of any one of claims 59-69, wherein the heterologous polynucleotide comprises a sequence that is at least 90% identical to SEQ ID NO: 4, 62-66, 68-71, 73-74, 78, 103-109, 111-117, 328, or 330.

71. The method of claim 70, wherein the heterologous polynucleotide comprises the sequence of SEQ ID NO: 4, 62-66, 68-71, 73-74, 78, 103-109, 111-117, 328, or 330.

72. A method of producing mogrol, one or more mogrol precursors, and/or one or more mogrosides comprising culturing a host cell that comprises a heterologous polynucleotide encoding a lanosterol synthase, wherein the lanosterol synthase comprises an amino acid substitution or deletion relative to SEQ ID NO: 313 at one or more residues corresponding to position 64, 120, 121, 136, 226, 268, 275, 281, 300, 322, 333, 438, 502, 604, 619, 628, 656, 693, 726, 727, 728, 729, 730, and/or 731.

73. The method of claim 72, wherein the lanosterol synthase comprises:
(a) the amino acid G at the residue corresponding to position 64 in SEQ ID NO: 313;
(b) the amino acid V at the residue corresponding to position 120 in SEQ ID NO: 313;
(c) the amino acid S at the residue corresponding to position 121 in SEQ ID NO: 313;
(d) the amino acid V at the residue corresponding to position 136 in SEQ ID NO: 313;
(e) the amino acid I at the residue corresponding to position 226 in SEQ ID NO: 313;
(f) the amino acid S at the residue corresponding to position 268 in SEQ ID NO: 313;
(g) the amino acid I at the residue corresponding to position 275 in SEQ ID NO: 313;
(h) the amino acid A at the residue corresponding to position 281 in SEQ ID NO: 313;
(i) the amino acid G at the residue corresponding to position 300 in SEQ ID NO: 313;
(j) the amino acid G at the residue corresponding to position 322 in SEQ ID NO: 313;
(k) the amino acid A at the residue corresponding to position 333 in SEQ ID NO: 313;
(l) the amino acid E at the residue corresponding to position 438 in SEQ ID NO: 313;
(m) the amino acid L at the residue corresponding to position 502 in SEQ ID NO: 313;
(n) the amino acid N at the residue corresponding to position 604 in SEQ ID NO: 313;
(o) the amino acid S at the residue corresponding to position 619 in SEQ ID NO: 313;
(p) the amino acid E at the residue corresponding to position 628 in SEQ ID NO: 313;
(q) the amino acid T at the residue corresponding to position 656 in SEQ ID NO: 313;
(r) the amino acid G at the residue corresponding to position 693 in SEQ ID NO: 313; and/or
(s) deletion of residues corresponding to positions 726-731 in SEQ ID NO: 313.

74. The method of claim 72 or 73, wherein the lanosterol synthase comprises relative to SEQ ID NO: 313:
(a) P121S, A136V, S300G, V322G, K438E, F502L, K628E, and deletion of residues corresponding to positions 726-731 in SEQ ID NO: 313;
(b) K268S, T281A, F502L, T604N, A656T, and E693G; or
(c) C619S, F275I, I120V, M226I, R64G, and T333A.

75. The method of any one of claims 72-74, wherein the lanosterol synthase comprises a sequence that is at least 90% identical to any one of SEQ ID NOs: 100-102.

76. The method of claim 75, wherein the lanosterol synthase comprises a sequence selected from SEQ ID NOs: 100-102.

77. The method of any one of claims 72-76, wherein the heterologous polynucleotide encoding the lanosterol synthase comprises a sequence that is at least 90% identical to a sequence selected from SEQ ID NOs: 80-82.

78. The method of claim 77, wherein the heterologous polynucleotide encoding the lanosterol synthase comprises a sequence selected from SEQ ID NOs: 80-82.

79. The method of any one of claims 59-78, wherein the host cell is capable of producing mevalonate.

80. The method of any one of claims 59-79, wherein the host cell is capable of producing at least 0.2 g/L mevalonate.

81. The method of any one of claims 59-80, wherein the host cell is capable of producing at least 0.7 g/L mevalonate.

82. The method of any one of claims 59-81, wherein the host cell is capable of producing at least 9 mg/L cucurbitadienol.

83. The method of any one of claims 59-82, wherein the host cell is capable of producing at least 1.1 fold more cucurbitadienol than a control host cell comprising SEQ ID NO: 1 and/or a control host cell comprising SEQ ID NO: 313.

84. The method of any one of claims 59-83, wherein the host cell is capable of producing at least 3 fold more cucurbitadienol than a control host cell comprising SEQ ID NO: 1 and/or a control host cell comprising SEQ ID NO: 313.

85. The method of any one of claims 59-84, wherein the host cell is capable of producing at most 200 mg/L lanosterol.

86. The method of any one of claims 59-85, wherein the host cell is capable of producing at least 5 mg/L oxidosqualene.

87. The method of any one of claims 59-86, wherein the host cell is capable of producing more mevalonate than a control host cell that does not comprise the heterologous polynucleotide.

88. The method of any one of claims 59-87, wherein the host cell further comprises one or more heterologous polynucleotides encoding one or more of: a UDP-glycosyltransferases (UGT) enzyme, a cucurbitadienol synthase (CDS) enzyme, a C11 hydroxylase, an epoxide hydrolase (EPH), and squalene epoxidase (SQE).

89. The method of claim 88, wherein the UGT enzyme comprises a sequence that is at least 90% identical to SEQ ID NO: 121.

90. The method of claim 88 or 89, wherein the CDS enzyme comprises a sequence that is at least 90% identical to any one of SEQ ID NOs: 226, SEQ ID NO: 235, SEQ ID NO: 232, and SEQ ID NO: 256.

91. The method of any one of claims 88-90, wherein the C11 hydroxylase comprises a sequence that is at least 90% identical to any one of SEQ ID NOs: 280-281, 305, and 315.

92. The method of any one of claims 88-91, wherein the EPH comprises a sequence that is at least 90% identical to any one of SEQ ID NO: 284-292 and 309-310.

93. The method of any one of claims 88-92, wherein the SQE comprises a sequence that is at least 90% identical to any one of SEQ ID NOs: 293-295 and 312.

94. The method of any one of claims 59-93, wherein the host cell further comprises a heterologous polynucleotide encoding a cytochrome P450 reductase.

95. The method of claim 94, wherein the cytochrome P450 reductase comprises a sequence that is at least 90% identical to any one of SEQ ID NOs: 282-283 and 306-307.

96. The method of any one of claims 59-93, wherein the host cell further comprises a heterologous polynucleotide encoding a cytochrome P450 reductase with reduced activity as compared to a control cytochrome P450 reductase or a heterologous polynucleotide that reduces cytochrome P450 activity.

97. The method of claim 96, wherein the control cytochrome P450 reductase is a wild-type P450 reductase.

98. The method of any one of claims 59-97, wherein the host cell is a yeast cell, a plant cell, or a bacterial cell.

99. The method of claim 98, wherein the host cell is a yeast cell.

100. The method of claim 99, wherein the yeast cell is a Saccharomyces cerevisiae cell.

101. The method of claim 99, wherein the yeast cell is a Yarrowia lipolytica cell.

102. The method of claim 98, wherein the host cell is a bacterial cell.

103. The method of claim 102, wherein the bacterial cell is an E. coli cell.

104. The method of any one of claims 59-103, wherein the host cell further comprises a heterologous polynucleotide encoding an acetoacetyl COA synthase.

105. The method of claim 104, wherein the acetoacetyl COA synthase comprises a sequence that is at least 90% identical to SEQ ID NO: 6.

106. The method of claim 105, wherein the heterologous polynucleotide encoding the acetoacetyl COA synthase comprises a sequence that is at least 90% identical to SEQ ID NO: 7.

107. The method of any one of claims 59-106, wherein the mogroside is selected from mogroside I-A1 (MIA1), mogroside IE (MIE), mogroside II-A1 (MIIA1), mogroside II-A2 (MIIA2), mogroside III-A1 (MIIIA1), mogroside II-E (MIIE), mogroside III (MIII), siamenoside I, mogroside IV (MIV), mogroside IVa (MIVA), isomogroside IV, mogroside III-E (MIIIE), mogroside V (MV), mogroside VIA (MVIA), mogroside VIB (MVIB), isomogroside V, mogroside VIa1 (MVIa1), and/or mogroside VI (MVI).

The application's sequence listing, which the Patent Office published only in electronic form, follows.

SEQUENCE LISTING (332 sequences)

SEQ ID NO: 1 - protein, 742 aa, Yarrowia lipolytica
MGIHESVSKQFAKNGHSKYRSDRYGLPKTDLRRWTFHASDLGAQWWKYDDTTPLEELEKRATDYVKYSLELPGYAPVTLDSKPVKNAYEAALKNWHLFASLQDPDSGAWQSEYDGPQFMSIGYVTACYFGGNEIPTPVKTEMIRYIVNTAHPVDGGWGLHKEDKSTCFGTSINYVVLRLLGLSRDHPVCVKARKTLLTKFGGAINNPHWGKTWLSILNLYKWEGVNPAPGELWLLPYFVPVHPGRWWVHTRWIYLAMGYLEAAEAQCELTPLLEELRDEIYKKPYSEIDFSKHCNSISGVDLYYPHTGLLKFGNALLRRYRKFRPQWIKEKVKEEIYNLCLREVSNTRHLCLAPVNNAMTSIVMYLHEGPDSANYKKIAARWPEFLSLNPSGMFMNGTNGLQVWDTAFAVQYACVCGFAELPQYQKTIRAAFDFLDRSQINEPTEENSYRDDRVGGWPFSTKTQGYPVSDCTAEALKAIIMVQNTPGYEDLKKQVSDKRKHTAIDLLLGMQNVGSFEPGSFASYEPIRASSMLEKINPAEVFGNIMVEYPYVECTDSVVLGLSYFRKYHDYRNEDVDRAISAAIGYIIREQQPDGGFFGSWGVCYCYAHMFAMEALETQNLNYNNCSTVQKACDFLAGYQEADGGWAEDFKSCETQMYVRGPHSLVVPTAMALLSLMSGRYPQEDKIHAAARFLMSKQMSNGEWLKEEMEGVFNHTCAIEYPNYRFYFVMKALGLYFKGYCQ

SEQ ID NO: 2 - DNA, 2229 bp, Artificial sequence
  Synthetic
atgggaatccacgaaagtgtgtcgaaacagtttgcgaaaaacggacattccaagtaccgcagcgaccgatacggcttacctaagacggatctgcgacgatggacgttccacgcgtccgatctgggggcgcaatggtggaagtatgacgataccacaccgctggaagagctggaaaagagggctaccgactacgtcaaatactcgctggagctgccgggatacgcgcccgtgactctggactccaagcccgtgaaaaatgcctacgaagcggctctcaaaaactggcatctgtttgcgtcgctgcaagaccccgactccggcgcatggcagtcggaatacgacggaccgcagttcatgtcgatcggttatgtgacggcgtgctactttggcggcaacgagatccccacgccggtcaaaaccgaaatgatcagatacattgtcaacacagcccacccagttgacggaggctggggccttcacaaagaagacaagagcacctgtttcggtaccagcatcaactacgtggtcctgcgactactgggcctgtcacgggatcatccggtctgcgtcaaggcgcgcaaaacgctgctcaccaagtttggcggcgccatcaacaacccccattggggcaagacctggctgtcgattctcaatctctacaaatgggagggtgtgaatccggcccctggcgagctctggctgttgccctactttgttcctgttcatccgggccgatggtgggtccatacccggtggatctaccttgccatgggctatctggaggctgcggaggcccaatgcgaactcactccgttgctggaggagctccgagacgaaatctacaaaaagccctactcggagattgatttctccaaacattgcaactccatctccggagtcgacctctactatccccacaccggccttttgaagtttggcaacgcgcttctccgacgataccgcaagttcagaccgcagtggatcaaagaaaaggtcaaggaggaaatttacaacttgtgccttcgagaggtttccaacacacgacacttgtgtctcgctcccgtcaacaatgccatgacctccattgtcatgtatctccatgaggggcccgattcggcgaattacaaaaagattgcggcccgatggcccgaatttctgtctctgaatccgtcgggaatgtttatgaacggcaccaacggtctgcaggtctgggatactgcgtttgccgtgcaatacgcgtgtgtttgtggctttgccgaacttccccagtaccagaagacgatccgagcggcgtttgattttctcgatcggtcccagatcaacgagccgacggaggaaaattcctatcgagacgaccgcgtcggaggatggccctttagtaccaagacccaggggtatccagtctccgactgtactgccgaggctctcaaggccatcatcatggtccagaatacgcctggatacgaggatctgaagaaacaagtgtctgacaagcggaaacacactgccatcgatctacttttgggaatgcagaacgtgggctcgtttgaaccgggctctttcgcctcctatgagcctatccgggcgtcgtccatgctggagaagatcaatccggccgaggtgtttggaaacatcatggtggagtatccgtacgtggaatgcactgattctgttgttctgggtctgtcctactttcgaaagtaccacgattaccgcaacgaagacgtggaccgagccatctctgctgccattggatacattattcgagagcagcagcctgacggcggcttctttggctcctggggcgtgtgctactgctacgctcacatgtttgccatggaggctctggagacgcagaatctcaactataacaactgttccacggttcaaaaggcgtgcgactttctggcgggctaccaggaagcagatggaggctgggccgaggactttaagtcgtgcgagactcagatgtacgtgcgcggaccccattcgctggtcgtgcctactgccatggccctgttgagtttgatgagtggtcggtatccccaggaggacaagattcatgctgcggcccggtttctcatgagcaagcagatgagcaacggtgagtggctcaaggaggagatggagggggtgtttaaccatacttgtgccattgagtatcccaactaccggttttattttgtcatgaaggctttggggttgtatttcaagggatattgccagtga

SEQ ID NO: 3 - protein, 742 aa, Artificial sequence
  Synthetic
MGIHESVSKQFAKNGHSKYRSDRYGLPKTDLRRWTFHASDLGAQWWKYDGTTPLEELEKRATDYVRYSLELPGYAPVTLDSKPVKNAYEAALKSWHLFASLQDPDSGAWQSEYDGPQFMSIGYVTACYFGGNEIPTPVKTEMIRYIVNTAHPVDGGWGLHKEDKSTCFGTSINYVVLRLLGLSRDHPVCVKARKTLLTKFGGAINNPHWGKTWLSILNLYKWEGVNPAPGELWLLPYFVPVHPGRWWVHTRWIYLAMGYLEAAEAQCELTPLLEELRDEIYKKPYSEIDFSKHCNSISGVDLYYPHTGLLKFGNALLRRYRKFRPQWIKEKVKEEIYNLCLREVSNTRHLCLAPVNNAMTSIVMYLHEGPDSANYKKIAARWPEFLSLNPSGMFMNGTNGLQVWDTAFAVQYACVCSFAELPQYQKTIRAAFDFLDRSQINEPTEENSYRDDRVGGWPFSTKTQGYPVSDCTAEALKAIIMVQNTPGYEDLKKQVSDKRKHTAIDLLLGMQNVGSFEPGSFASYEPIRASSMLEKINPAEVFGNIMVEYPYVECTDSVVLGLSYFRKYHDYRNEDVDRAISAAIGYIIREQQPDGGFFGSWGVCYCYAHMFAMEALVTQNLNYNNCSTVQKACDFLAGYQEADGGWAEDFKSCETQMYVRGPHSLVVPTAMALLSLMSGRYPQEDKIHAAARFLMSKQMSNGEWLKEEMEGVFNHTCAIEYPNYRLYFVMKALGLYFKGYCQ

SEQ ID NO: 4 - DNA, 2229 bp, Artificial sequence
  Synthetic
atgggaatccacgaaagtgtgtcgaaacagtttgcgaaaaacggacattccaagtaccgcagcgaccgatacggcttacctaagacggatctgcgacgatggacgttccacgcgtccgatctgggggcgcaatggtggaagtatgacggtaccacaccgctggaagagctggaaaagagggctaccgactacgtcagatactcgctggagctgccgggatacgcgcccgtgactctggactccaagcccgtgaaaaatgcctacgaagcggctctcaaaagctggcatctgtttgcgtcgctgcaagaccccgactccggcgcatggcagtcggaatacgacggaccgcagttcatgtcgatcggttatgtgacggcgtgctactttggcggcaacgagatccccacgccggtcaaaaccgaaatgatcagatacattgtcaacacagcccacccagttgacggaggctggggccttcacaaagaagacaagagcacctgtttcggtaccagcatcaactacgtggtcctgcgactactgggcctgtcacgggatcatccggtctgcgtcaaggcgcgcaaaacgctgctcaccaagtttggcggcgccatcaacaacccccattggggcaagacctggctgtcgattctcaatctctacaaatgggagggtgtgaatccggcccctggcgagctctggctgttgccctactttgttcctgttcatccgggccgatggtgggtccatacccggtggatctaccttgccatgggctatctggaggctgcggaggcccaatgcgaactcactccgttgctggaggagctccgagacgaaatctacaaaaagccctactcggagattgatttctccaaacattgcaactccatctccggagtcgacctctactatccccacaccggccttttgaagtttggcaacgcgcttctccgacgataccgcaagttcagaccgcagtggatcaaagaaaaggtcaaggaggaaatttacaacttgtgccttcgagaggtttccaacacacgacacttgtgtctcgctcccgtcaacaatgccatgacctccattgtcatgtatctccatgaggggcccgattcggcgaattacaaaaagattgcggcccgatggcccgaatttctgtctctgaatccgtcgggaatgtttatgaacggcaccaacggtctgcaggtctgggatactgcgtttgccgtgcaatacgcgtgtgtttgtagctttgccgaacttccccagtaccagaagacgatccgagcggcgtttgattttctcgatcggtcccagatcaacgagccgacggaggaaaattcctatcgagacgaccgcgtcggaggatggccctttagtaccaagacccaggggtatccagtctccgactgtactgccgaggctctcaaggccatcatcatggtccagaatacgcctggatacgaggatctgaagaaacaagtgtctgacaagcggaaacacactgccatcgatctacttttgggaatgcagaacgtgggctcgtttgaaccgggctctttcgcctcctatgagcctatccgggcgtcgtccatgctggagaagatcaatccggccgaggtgtttggaaacatcatggtggagtatccgtacgtggaatgcactgattctgttgttctgggtctgtcctactttcgaaagtaccacgattaccgcaacgaagacgtggaccgagccatctctgctgccatcggatacattattcgagagcagcagcctgacggtggcttctttggctcctggggcgtgtgctactgctacgctcacatgtttgccatggaggctctggtgacgcagaatctcaactataacaactgttccacggttcaaaaggcgtgcgactttctggcgggctaccaggaagcagatggaggctgggccgaggactttaagtcgtgcgagactcagatgtacgtgcgcggaccccattcgctggtcgtgcctactgccatggccctgttgagtttgatgagtggtcggtatccccaggaggacaagattcatgctgcggcccggtttctcatgagcaagcagatgagcaacggtgagtggctcaaggaggagatggagggggtgtttaaccatacttgtgccattgagtatcccaactaccggttatattttgtcatgaaggctttggggttgtatttcaagggatattgccagtga

SEQ ID NO: 5 - protein, 5 aa, Artificial sequence
  Synthetic
DCTAE

SEQ ID NO: 6 - protein, 329 aa, Unknown
  Streptomyces sp. CL190
MTDVRFRIIGTGAYVPERIVSNDEVGAPAGVDDDWITRKTGIRQRRWAADDQATSDLATAAGRAALKAAGITPEQLTVIAVATSTPDRPQPPTAAYVQHHLGATGTAAFDVNAVCSGTVFALSSVAGTLVYRGGYALVIGADLYSRILNPADRKTVVLFGDGAGAMVLGPTSTGTGPIVRRVALHTFGGLTDLIRVPAGGSRQPLDTDGLDAGLQYFAMDGREVRRFVTEHLPQLIKGFLHEAGVDAADISHFVPHQANGVMLDEVFGELHLPRATMHRTVETYGNTGAASIPITMDAAVRAGSFRPGELVLLAGFGGGMAASFALIEW

SEQ ID NO: 7 - DNA, 990 bp, Artificial sequence
  Synthetic
atgaccgacgtccgattccgaattatcggtactggtgcctacgttcccgaacgaatcgtttccaacgatgaagtcggtgctcctgccggtgttgacgacgactggatcacccgaaagaccggtattcgacagcgacgatgggctgccgatgaccaggccacctctgatctggccactgctgccggtcgagctgccctgaaggccgctggtatcactcccgagcagctgaccgttattgctgttgccacctccactcccgatcgaccccagcctcccactgctgcctatgttcagcaccacctcggagccaccggtactgctgccttcgacgtcaacgctgtctgctccggtaccgttttcgccctgtcctctgttgctggcaccctcgtttaccgaggtggttacgctctggtcattggcgctgacctgtactctcgaatcctcaaccctgccgaccgaaagaccgtcgttctgttcggtgatggtgccggtgccatggttctcggtcctacctccaccggtactggtcccattgttcgacgagttgccctgcacaccttcggtggtctgaccgacctgattcgagtccccgctggtggttctcgacagcccctggacactgatggcctcgatgctggactgcagtacttcgctatggacggtcgtgaggtccgacgattcgtcactgagcacctcccccagctgatcaagggtttcctgcacgaggccggtgtcgacgctgccgacatctctcacttcgtccctcatcaggccaacggtgtcatgctcgacgaggtcttcggcgagctgcatctgcctcgagctaccatgcaccgaactgtcgagacttacggcaacaccggagctgcctccattcccatcaccatggacgctgccgttcgagccggttccttccgacctggtgagctggtcctgctggccggtttcggtggcggtatggccgcttccttcgccctgatcgagtggtag

SEQ ID NO: 8-59 - skipped (52 entries)

SEQ ID NO: 60 - DNA, 1362 bp, Artificial sequence
  Synthetic
atggacgcgcaacgcggacatacgactaccatcctgatgtttccgtggttggggtacggccaccttagtgcattcctcgaattagccaagagcttgtcgcgtaggaactttcatatttatttctgttccacatctgtcaatttagatgctataaaacccaaactaccatcatcttcaagttccgattctattcagcttgtagagttatgcttgccttcctcgccagaccaactacccccacacctgcatacaactaatgctctacctccacatctaatgcctaccctgcaccaggccttttcaatggcagctcaacattttgcagctatattacatactttagcaccgcacttgttaatctatgattcgttccagccttgggcgccacaattggccagctctcttaacattcctgctattaattttaataccacgggtgccagtgtgctaacaagaatgttacacgcgactcattacccatcttcaaagttcccaatctccgaatttgttttacatgattattggaaagcaatgtattcagcagctggtggtgctgttacaaaaaaggaccataaaataggagaaaccttggcaaactgtttacacgcttcttgctcggtaattctgatcaattcattcagagagttggaagaaaaatacatggattacttgtctgtcttactaaacaagaaagttgtgcccgtgggtccgcttgtttatgagccaaaccaagatggcgaagacgaaggttatagttcgataaagaattggctcgataaaaaggagccctcctcaactgtctttgtttccttcgggtccgaatattttccgtccaaagaagaaatggaagaaattgcccatggcttggaggctagcgaggtacactttatttgggtcgttagattcccacaaggagacaatacttctgcaattgaagatgcccttcctaagggttttcttgagcgagtgggcgaacgtggaatggtggttaagggttgggctcctcaggccaaaattttgaaacattggagcacaggcggtttcgtaagtcattgtggatggaatagtgttatggagagcatgatgtttggtgtacccataataggtgttccgatgcatttagatcaaccatttaatgcagggctcgcggaagaagcaggagtaggggtagaggctaaaagggaccctgatggtaagatacagagagatgaagtcgctaaactgatcaaagaagtggttgtcgaaaaaacgcgcgaagatgtcagaaagaaggctagggaaatgtctgaaattttacgttcgaaaggtgaggaaaagatggacgagatggttgcagccattagtctcttcttgaagatataa

SEQ ID NO: 61 - DNA, 2229 bp, Artificial sequence
  Synthetic
atgggaatccacgaaagtgtgtcgaaacagtttgcgaaaaacggacattccaagtaccgcagcgaccgatacggcttacctaagacggatctgcgacgatggacgttccacgcgtccgatctgggggcgcaatggtggaagtatgacgataccacaccgctggaagagctggaaaagagggctaccgactacgtcaaatactcgctggagctgccgggatacgcgcccgtgactctggactccaagcccgtgaaaaatgcctacgaagcggctctcaaaaactggcatctgtttgcgtcgctgcaagaccccgactccggcgcgtggcagagcgaatacgacggaccgcagttcatgagcatcggctatgtgacggcgtgctactttggcggcaacgagatccccacgccggtcaaaaccgaaatgatcagatacattgtcaacacagcccacccagttgacggaggctggggccttcacaaagaagacaagagcacctgcttcggtaccagcatcaactacgtggtcctgcgactactgggcctgtcacgggaccatccggtctgcgtcaaggcgcgcaaaacgctgctcaccaagtttggcggcgccatcaacaacccccattggggcaagacctggctgtcgattctcaatctctacaaatgggagggtgtgaatccggcccctggcgagctctggctgttgccctactttgttcctgttcatccgggccgatggtgggtccatacccggtggatctaccttgccatgggctatctggaggctgcggaggcccaatgcgaactcactccgttgctggaggagctccgagacgaaatctacaaaaagccctactcggagattgatttctccaaacattgcaactccatctccggagtcgacctctactatccccacaccggccttttgaagtttggcaacgcgcttctccgacgataccgcaagttcagaccgcagtggatcaaagaaaaggtcaaggaggaaatttacaacttgtgccttcgagaggtttccaacacacgacacttgtgtctcgctcccgtcaacaatgccatgacctccattgtcatgtatctccatgaggggcccgattcggcgaattacaaaaagattgcggcccgatggcccgaatttctgtctctgaatccgtcgggaatgtttatgaacggcaccaacggtctccaggtctgggatactgcgtttgccgtgcaatacgcgtgtgtttgtggctttgccgaacttccccagtaccagaagacgatccgagcggcgtttgattttctcgatcggtcccagatcaacgagccgacggaggaaaattcctatcgagacgaccgcgtcggaggatggccctttagtaccaagacccaggggtatccggtctccgactgtactgccgaggctctcaaggccatcatcatggtccagaatacgcctggatacgaggatctgaagaaacaagtgtctgacaagcggaaacacactgccatcgatctacttttgggaatgcagaacgtgggctcgtttgaaccgggctctttcgcctcctatgagcctatccgggcgtcgtccatgctggagaagatcaatccggccgaggtgtttggaaacatcatggtggagtatccgtacgtggaatgcactgattctgttgttctgggtctctcctactttcgaaagtaccacgattaccgcaacgaagacgtggaccgagccatctctgctgccattggatacattattcgagagcagcagcctgacggcggcttctttggctcctggggcgtgtgctactgctacgctcacatgtttgccatggaggctctggagacgcagaatctcaactataacaactgttccacggttcaaaaggcgtgcgactttctggcgggctaccaggaagcagatggaggctgggccgaggactttaagtcgtgcgagacccagatgtacgtgcgcggaccccattcgctggtcgtgcctactgccatggccctgttgagtttgatgagtggtcggtatccccaggaggacaagattcatgctgcggcccggtttctcatgagcaagcagatgagcaacggtgagtggctcaaggaggagatggagggggtgtttaaccatacttgtgccattgagtatcccaactaccggttttattttgtcatgaaggctttggggttgtatttcaagggatattgccagtga

SEQ ID NO: 62 - DNA, 2229 bp, Artificial sequence
  Synthetic
atgggaatccacgaaagtgtgtcgaaacagtttgcgaaaaacggacattccaagtaccgcagcgaccgatacggcttacctaagacggatctgcgacgatggacgttccacgcgtccgatctgggggcgcaatggtggaagtatgacgataccacaccgctggaagagttggaaaagagggctaccgactacgtcaaatactcgctggagctgccgggatacgcgcccgtgactctggactccaagcccgtgaaaaatgcctacgaagcggctctcaaaaactggcatctgtttgcgtcgctgcaagaccccgactccggcgcatggcagtcggaatacgacggaccgcagttcatgtcgatcggttatgtgacggcgtgctactttggcggcaacgagatccccacgccggtcaaaaccgaaatgatcagatacattgtcaacacagcccacccagttgacggaggctggggccttcacaaagaagacaagagcacctgtttcggtaccagcatcaactacgtggtcctgcgactactgggcctgtcgcgggatcatccggtctgcgtcaaggcgtgcaaaacgctgctcaccaagtttggcggcgccatcaacaacccccattggggcaagacctggctgtcgattctcaatctctacaaatgggagggtgtgaatccggcccctggcgagctctggctgttgccctactttgttcctgttcatccgggccgatggtgggtccatacccggtggatctaccttgccatgggctatctggaggctgcggaggcccaatgcgaactcactccgttgctggaggagctccgagacgaaatctacaaaaagccctactcggagattggtttctccaaacattgcatcaccatctccggagtcgacctctactatccccacaccggccttttgaagtttggcaacgcgcttctccgacgataccgcaagttcagaccgcagtggatcaaagaaaaggtcaaggaggaaatttataacttgtgccttcgagaggtttccaacacacgacacttgtgtctcgctcccgtcaacaatgccatgacctccattgtcatgtatctccatgaggggcccgattcggcgaattacaaaaagattgcggcccgatggcccgaatttctgtctctgaatccgtcgggaatgtttatgaacggcaccaacggtctgcaggtctgggatactgcgtttgccgtgcaatacgcgtgtgtttgtggctttgccgaacttccccagtaccagaagacgatccgagcggcgtttgattttctcgatcggtcccagatcaacgagccgacggaggaaaattcctatcgagacgaccgcgtcggaggatggccctttagtaccaagacccaggggtatccagtctccgactgtactgccgaggctctcaaggccatcatcatggtccagaatacgcctggatacgaggatctgaagaaacaagtgtctgacaagcggaaacacactgccatcgatctacttttgggaatgcagaacgtgggctcgtttgaaccgggctctttcgcctcctatgagcctatccgggcgtcgtccatgctggagaagatcaatccggccgaggtgtttggaaacatcatggtggagtatccgtacgtggaatgcactgattctgttgttctgggtctgtcctactttcgaaagtaccacgattaccgcaacgaagacgtggaccgagccatctctgctgccattggatacattattcgagagcagcagcctgacggcggcttctttggctcctggggcgtgtgctactgctacgctcacatgtttgccatggaggctctggagacgcagagtctcaactataacaactgttccacggttcaaaaggcgtgcgactttctggcgggctaccaggaagcagatggaggctgggccgaggactttaagtcgtgcgagactcagatgtacgtgcgcggaccccattcgctggtcgtgcctactgccatggccctgttgagtttgatgagtggtcggtatccccaggaggacaagattcatgctgcggcccggtttctcatgagcaagcagatgagcaacggtgagtggctcaaggaggagatggagggggtgtttaaccatacttgtgccattgagtatcccaactaccggttttattttgtcatgaaggctttggggttgtttttcaagggatattgccagtga

SEQ ID NO: 63 - DNA, 2229 bp, Artificial sequence
  Synthetic
atgggaatccacgaaagtgtgtcgaaacagtttgcgaaaaacggacattccaagtaccgcagcgaccgatacggcttacctaagacggatctgcgacgatggacgttccacgcgtccgatctgggggcgcaatggtggaagtatgacgataccacaccgctggaagagctggaaaagagggctaccgactacgtcaaatactcgctggagctgccgggatacgcgcccgtgactctggactccaagcccgtgaaaaatgcctacgaagcggctctcaaaaactggcatctgtttgcgtcgctgcaagaccccgactccggcgcatggcagtcggaatacgacggaccgcagttcatgtcgatcggttatgtgacggcgtgctactttggcggcaacgagatccccacgccggtcaaaaccgaaatgatcagatacattgtcaacacagcccacccagttgacggaggctggggccttcacaaagaagacaagagcacctgtttcggtaccagcaacaactacgtggtcctgcgactactgggcctgtcacgggatcatccggtctgcgtcaaggcgcgcaaaacgctgctcaccaagtttggcggcgccatcaacaacccccattggggcaagacctggctgtcgattctcaatctctacaaatgggagggtgtgaatccggcccctggcgagctctggctgttgccctactttgttcctgttcatccgggccgatggtgggtccatacccggtggatctaccttgccatgggctatctggaggctgcggaggcccaatgcgaactcactccgttgctggaggagctccgagacgaaatctacaaaaagccctactcggagattgatttctccaaacattgcaactccatctccggagtcgacctctactatccccacaccggccttttgaagtttggcaacgcgcttctccgacgataccgcaagttcagaccgcagtggatcaaagaaaaggtcaaggaggaaatttacaacttgtgccttcgagaggtttccaacacacgacacttgtgtctcgctcccgtcaacaatgccatgacctccattgtcatgtatctccatgaggggcccgattcggcgaattacaaaaagattgcggcccgatggcccgaatttctgtctctgaatccgtcgggaatgtttatgaacggcaccaacggtctgcaggtctgggatactgcgtttgccgtgcaatacgcgagtgtttgtggctttgccgaacttccccagtaccagaagacgatccgagcggcgtttgattttctcgatcggtcccagatcaacgagccgacggaggaaaattcctatcgagacgaccgcgtcggaggatggccctttagtaccaagacccaggggtatccagtctccgactgtactgccgaggctctcaaggccatcatcatggtccagaatacgcctggatacgaggatctgaagaaacaagtgtctgacaagcggaaacacactgccatcgatctacttttgggaatgcagaacgtgggctcgtttgaaccgggctctttcgcctcctatgagcctatccgggcgtcgtccatgctggagaagatcaatccggccgaggtgtttggaaacatcatggtggagtatccgtacgtggaatgcactgattctgttgttatgggtctgtcctactttcgaaagtaccacgattaccgcaacgaagacgtggaccgagccatctctgctgccattggatacattattcgagagcagcagcctgacggcggcttctttggctcctggggcgtgtgctactgctacgctcacatgtttgccatggaggctctggagacgcagaatctcaactataacaactgttccacggttcaaaaggcgtgcgactttctggcgggctaccaggaagcagatggaggctgggccgaggactttaagtcgtgcgagactcagatgtacgtgcgcggaccccattcgctggtcgtgcctactgccatggccctgttgagtttgatgagtagtcggtatccccaggaggacaagattcatgctgcggcccggtttctcatgagcaagcagatgagcaacggtgagtggctcaaggaggagatggagggggtgtttaaccatacttgtgccattgagtatcccaactaccggttttattttgtcatgaaggctttggggttgtatttcaagggatattgccagtga

SEQ ID NO: 64 - DNA, 2229 bp, Artificial sequence
  Synthetic
atgggaatccacgaaagtgtgtcgaaacagtttgcgaaaaacggacattccaagtaccgcagcgaccgatacggcttacctaagacggatctgcgacgatggacgttccacgcgtccgatctgggggcgcaatggtggaagtatgacgataccacaccgctggaagagctggaaaagagggctaccgactacgtcaaatactcgctggagctgccgggatacgcgcccgtgactctggactccaagcccgtgaaaaatgcctacgaagcggctctcaaaaactggcatctgtttgcgtcgctgcaagaccccgactccggcgcatggcagtcggaatacgacggaccgcagttcatgtcgatcggttatgtgacggcgtgctactttggcggcaacgagatccccacgccggtcaaaaccgaaatgatcagatacattgtcaacacagcccacccagttgacggaggctggggccttcacaaagaagacaagagcacctgtttcggtaccagcatcaactacgtggtcctgcgactactgggcctgtcacgggatcatccggtctgcgtcaaggcgcgcaaaacgctgctcaccaagtttggcggcgccatcaacaacccccattggggcaagacctggctgtcgattctcaatctctacaaatgggagggtgtgaatccggcccctggcgagctctggctgttgccctactttgttcctgttcatccgggccgatggtgggtccatacccggtggatctaccttgccatgggctatctggaggctgcggaggcccaatgcgaactcactccgttgctggaggagctccgagacgaaatctacaaaaagccctactcggagattgatttctccaaacattgcaactccatctccggagtcgacctctactatccccacaccggccttttgaagtttggcaacgcgcttctccgacgataccgcaagttcagaccgcagtggatcaaagaaaaggtcaaggaggaaatttacaacttgtgccttcgagaggtttccaacacacgacacttgtgtctcgctcccgtcaacaatgccatgacctccattgtcatgtatctccatgaggggcccgattcggcgaattacaaaaagattgcggcccgatggcccgaatttctgtctctgaatccgtcgggaatgtttatgaacggcaccaacggtctgcaggtctgggatactgcgtttgccgtgcaatacgcgtgtgtttgtggctttgccgaacttccccagtaccagaagacgatccgagcggcgtctgattttctcgatcggtcccagatcaacgagccgacggaggaaaattcctatcgagacggccgcgtcggaggatggccctttagtaccaagacccaggggtatccagtctccgactgtactgccgaggctctcaaggccatcatcatggtccagaatacgcctggatacgaggatctgaagaaacaagtgtctgacaagcggaaacacactgccatcgatctacttttgggaatgcagaacgtgggctcgtttgaaccgggctctttcgcctcctatgagcctatccgggcgtcgtccatgctggagaagttcaatccggccgaggtgtttggaaacatcatggtggagtatccgtacgtggaatgcactgattctgttgttctgggtctgtcctactttcgaaagtaccacgattaccgcaacgaagacgtggaccgagccatctctgctgccattggatacattattcgagagcagcagcctgacggtggcttctttggctcctggggcgtgtgctactgctacgctcacatgtttgccatggaggctctggagacgcagaatctcaactataacaactgttccacggttcaaaaggcgtgcgactttctggcgggctaccaggaagcagatggaggctgggccgaggactttaagtcgtgcgagacccagatgtacgtgcgcggaccccattcgctggtcgtgcctactgccatggccctgttgagtttgatgagtggtcggtatccccaggaggacaagattcatgctgcggcccggtttctcatgagcaagcagatgagcaacggtgagtggctcaaggaggagatggagggggtgtttaaccatacttgtgccattgagtatcccaactaccggttttattttgtcatgaaggctttggggttgtatttcaagggatattgccagtga

SEQ ID NO: 65 - DNA, 2229 bp, Artificial sequence
  Synthetic
atgggaatccacgaaagtgtgtcgaaacagtttgcgaaaaacggacattccaagtaccgcagcgaccgatacggcttacctaagacggatctgcgacgatggacgttccacgcgtccgatctgggggcgcaatggtggaagtatgacgataccacaccgctggaagagctggaaaagagggctaccgactacgtcaaatactcgctggagctgccgggatacgcgcccgtgactctggactccaagcccgtgaataatgcctacgaagcggctctcaaaaactggcatctgtttgcgtcgctgcaagaccccgactccggcgcatggcagtcggaatacgacggaccgcagttcatgtcgatcggttatgtgacggcatgctactttggcggcaacgagatccccacgccggtcaaaaccgaaatgatcagatacattgtcaacacagcccacccagttgacggaggctggagccttcacaaagaagacaagagcacctgtttcggtaccagcatcaactacgtggtcctgcgactactgggcctgtcacgggatcatccggtctgcgtcaaggcgcgcaaaacgctgctcaccaagtttggcggcgccatcaacaacccccattggggcaagacctggctgtcgattctcaatctctacaaatgggagggtgtgaatccggcccctggcgagctctggctgttgccctactttgttcctgttcatccgggccgatggtgggtccatacccggtggatctaccttgccatgggctatctggaggctgcggaggcccaatgcgaactcactccgttgctggaggagctccgagacgaaatctacaaaaagccctactcggagattgatttctccaaacattgcaactccatctccggagtcgacctctactatccccacaccggccttttgaagtttggcaacgcgcttctccgacgataccgcaagttcagaccgcagtggatcaaagaaaaggtcaaggaggaaatttacaacttgtgccttcgagaggtttccaacacacgacacttgtgtctcgctcccgtcaacaatgccatgacctccattgtcatgtatctccatgaggggcccgattcggcgaattacaaaaagattgcggcccgatggcccgaatttctgtctctgaatccgtcgggaatgtttatgaacggcaccaacggtctccaggtctgggatactgcgtttgccgtgcaatacgcgtgtgtttgtggctttgccgaacttccccagtaccagaagacgatccgagcggcgtttgattttctcgatcggtcccagatcaacgagccgacggaggaaaattcctatcgagacgaccgcgtcggaggatggccctttagtaccaagacccaggggtatccggtctccgactgtactgccgaggctctcaaggccatcatcatggtccagaatacgcctggatacgaggatctgaagaaacaagtgtctgacaagcggaaacacactgccatcgatctacttttgggaatgcagaacgtgggctcgtttgaaccgggctctttcgcctcctatgagcctatccgggcgtcgtccatgctggagaagatcaatccggccgaggtgtttggaaacatcatggtggagtatccgtacgtggaatgcactgattctgttgttctgggtctctcctactttcgaaagtaccacgattaccgcaacgaagacgtggaccgagccatctctgctgccattggatacattattcgagagcagcagcctgacggcggcttctttggctcctggggcgtgtgctactgctacgctcacatgtttgccatggaggctctggagacgcagaatctcaactataacaactgttccacggttcaaaaggcgtgcgactttctggcgggctaccaggaagcagatggaggctgggccgaggactttaagtcgtgcgagacccagatgtacgtgcgcggaccccattcgctggtcgtgcctactgccatggccctgttgagtttgatgagtggtcggtatccccaggaggacaagattcatgctgcggcccggtttctcatgagcaagcagatgagcaacggtgagtggctcaaggaggagatggagggggtgtttaaccatacttgtgccattgagtatcccaactaccggttttattttgtcatgaaggctttggggttgtatttcaagggatattgccagtga

SEQ ID NO: 66 - DNA, 2229 bp, Artificial sequence
  Synthetic
atgggaatccacgaaagtgtgtcgaaacagtttgcgaaaaacggacattccaagtaccgcagcgaccgatacggcttacctaagacggatctgcgacgatggacgttccacgcgtccgatctgggggcgcaatggtggaagtatgacgataccacaccgctggaagagctggaaaagagggctaccgactacgtcaaatactcgctggagctgccgggatacgcgcccgtgactctggactccaagcccgtgaaaaatgcctacgaagcggctctcaaaaactggcatctgtttgcgtcgctgcaagaccccgactccggcgcatggcagtcggaatacgacggaccgcagttcatgtcgatcggttatgtgacggcgtgctactttggcggcaacgagatccccacgccggtcaaaaccgaaatgatcagatacattgtcaacacagcccacccagttgacggaggctggggccttcacaaagaagacaagagcacctgtttcggtaccagcatcaactacgtggtcctgcgactactgggcctgtcacgggatcatccggtctgcgtcaaggcgcgcaaaacgctggtcaccaagtttggcggcgccatcaacaacccccattggggcaagacctggctgtcgattctcaatctctacaaatgggagggtgtgaatccggcccctggcgagctctggctgttgccctactttgttcctgttcatccgggccgatggtgggtccatacccggtggatctaccttgccatgggctatctggaggctgcggaggcccaatgcgaactcactccgttgctggaggagctccgagacgaaatctacataaagccctactcggagattgatttctccaaacattgcaactccatctccggagtcgacctctactatccccacaccggccttttgaagtttggcagcgcgcttctccgacgataccgcaagttcagaccgcagtggatcaaagaaaaggtcaaggaggaaatttacaacttgtgccttcgagaggtttccaacacacgacacttgtgtctcgctcccgtcaacaatgccatgacctccattgtcatgtatctccatgaggggctcgattcggcgaattacaaaaagattgcggcccgatggcccgaatttctgtctctgaatccgtcgggaatgtttatgaacggcaccaacggtctgcaggtctgggatactgcgtttgccgtgcaatacgcgtgtgtttgtggctttgccgaacttccccagtaccagaagacgatccgagcggcgtttgattttctcgatcggtcccagatcaacgagccgacggaggaaaattcctatcgagacgaccgcgtcggaggatggccctttagtaccaagacccaggggtatccagtctccgactgtactgccgaggctctcaaggccatcatcatggtccagaatacgcctggatacgaggatctgaagaaacaagtgtctgacaagcggaaacacactgccatcgatctacttttgggaatgcagaacgtgggctcgtttgaaccgggctctttcgcctcctatgagcctatccgggcgtcgtccatgctggagaagatcaatccggccgaggtgtttggaaacatcatggtggagtatccgtacgtggaatgcactgattctgttgttctgggtctgtcctactttcgaaagtaccacgattaccgcaacgaagacgtggaccgagccatctctgctgccattggatatattattcgagagcagcagcctgacggcggcttctttggctcctggggcgtgtgctactgctacgctcacatgtttgccatggaggctctggagacgcagaatctcaactataacaactgttccacggttcaaaaggcgtgcgactttctggcgggctaccaggaagcagatggaggctgggccgaggactttaagtcgtgcgagacccagatgtacgtgcgcggaccccattcgctggtcgtgcctactgccatggccctgttgagtttgatgagtggtcggtatccccaggaggacaagattcatgctgcggcccggtttctcatgagcaagcagatgagcaacggtgagtggctcaaggaggagatggagggggtgtttaaccatacttgtgccattgagtatcccaactaccggttttattttgtcatgaaggctttggggttgtatttcaagggatattgccagtga

SEQ ID NO: 67 - skipped

SEQ ID NO: 68 - DNA, 2229 bp, Artificial sequence
  Synthetic
atgggaatccacgaaagtgtgtcgaaacagtttgcgaaaaacggacattccaagtaccgcagcgaccgatacggcttacctaagacggatctgcgacgatggacgttccacgcgtccgatctgggggcgcaatggtggaagtatgacgataccacaccgctggaagagctggaaaagagggctaccgactacgtcaaatactcgctggagctgccgggatacgcgcccgtgactctggactccaagcccgtgaaaaatgcctacgaagcggctctcaaaaactggcatctgtttgcgtcgctgcaagaccccgactccggcgcatggcagtcggaatacgacggaccgcagttcatgtcgatcggttatgtgacggcgtgctactttggcggcaacgagatccccacgccggtcaaaaccgaaatgatcagatacattgtcaacacagcccacccagttgacggaggctggggccttcacaaagaagacaagagcacctgtttcggtaccagcaacaactacgtggtcctgcgactactgggcctgtcacgggatcatccggtctgcgtcaaggcgcgcaaaacgctgctcaccaagtttggcggcgccatcaacaacccccattggggcaagacctggctgtcgattctcaatctctacaaatgggagggtgtgaatccggcccctggcgagctctggctgttgccctactttgttcctgttcatccgggccgatggtgggtccatacccggtggatctaccttgccatgggctatctggaggctgcggaggcccaatgcgaactcactccgttgctggaggagctccgagacgaaatctacaaaaagccctactcggagattgatttctccaaacattgcaactccatctccggagtcgacctctactatccccacaccggccttttgaagtttggcaacgcgcttctccgacgataccgcaagttcagaccgcagtggatcaaagaaaaggtcaaggaggaaatttacaacttgtgccttcgagaggtttccaacacacgacacttgtgtctcgctcccgtcaacaatgccatgacctccattgtcatgtatctccatgaggggcccgattcggcgaattacaaaaagattgcggcccgatggcccgaatttctgtctctgaatccgtcgggaatgtttatgaacggcaccaacggtctgcaggtctgggatactgcgtttgccgtgcaatacgcgagtgtttgtggctttgccgaacttccccagtaccagaagacgatccgagcggcgtttgattttctcgatcggtcccagatcaacgagccgacggaggaaaattcctatcgagacgaccgcgtcggaggatggccctttagtaccaagacccaggggtatccagtctccgactgtactgccgaggctctcaaggccatcatcatggtccagaatacgcctggatacgaggatctgaagaaacaagtgtctgacaagcggaaacacactgccatcgatctacttttgggaatgcagaacgtgggctcgtttgaaccgggctctttcgcctcctatgagcctatccgggcgtcgtccatgctggagaagatcaatccggccgaggtgtttggaaacatcatggtggagtatccgtacgtggaatgcactgattctgttgttatgggtctgtcctactttcgaaagtaccacgattaccgcaacgaagacgtggaccgagccatctctgctgccattggatacattattcgagagcagcagcctgacggcggcttctttggctcctggggcgtgtgctactgctacgctcacatgtttgccatggaggctctggagacgcagaatctcaactataacaactgttccacggttcaaaaggcgtgcgactttctggcgggctaccaggaagcagatggaggctgggccgaggactttaagtcgtgcgagacccagatgtacgtgcgcggaccccattcgctggtcgtgcctactgccatggccctgttgagtttgatgagtggtcggtatccccaggaggacaagattcatgctgcggcccggtttctcatgagcaagcagatgagcaacggtgagtggctcaaggaggagatggagggggtgtttaaccatacttgtgccattgagtatcccaactaccggttttattttgtcatgaaggctttggggttgtatttcaagggatattgccagtga

SEQ ID NO: 69 - DNA, 2229 bp, Artificial sequence
  Synthetic
atgggaatccacgaaagtgtgtcgaaacagtttgcgaaaaacggacattccaagtaccgcagcgaccgatacggcttacctaagacggatctgcgacgatggacgttccacgcgtccgatctgggggcgcaatggtggaagtatgacgataccacaccgctggaagagctggaaaagagggctaccgactacgtcaaatactcgctggagctgccgggatacgcgcccgtgactctggactccaagcccgtgaaaaatgcctacgaagcggctctcaaaaactggcatctgtttgcgtcgctgcaagaccccgactccggcgcgtggcagagcgaatacgacggaccgcagttcatgagcatcggctatgtgacggcgtgctactttggcggcaacgagatccccacgccggtcaaaaccgaaatgatcagatacattgtcaacacagcccacccagttgacggaggctggggccttcacaaagaagacaagagcacctgcttcggtaccagcatcaactacgtggtcctgcgactactgggcctgtcacgggaccatccggtctgcgtcaaggcgcgcaaaacgctgctcaccaagtttggcggcgccatcaacaacccccattggggcaagacctggctgtcgattctcaatctctacaaatgggagggtgtgaatccggcccctggcgagctctggctgttgccctactttgttcctgttcatccgggccgatggtgggtccatacccggtggatctaccttgccatgggctatctggaggctgcggaggcccaatgcgaactcactccgttgctggaggagctccgagacgaaatctacaaaaagccctactcggagattgatttctccaaacattgcaactccatctccggagtcgacctctactatccccacaccggccttttgaagtttggcaacgcgcttctccgacgataccgcaagttcagaccgcagtggatcaaagaaaaggtcaaggaggaaatttacaacttgtgccttcgagaggtttccaacacacgacacttgtgtctcgctcccgtcaacaatgccatgacctccattgtcatgtatctccatgaggggcccgtttcggcgaattacaaaaagattgcggcccgatggcccgaatttctgtctctgaatccgtcgggaatgtttatgaacggcaccaacggtctgcaggtctgggatactgcgtttgccgtgcaatacgcgtgtgtttgtggctttgccgaacttccccagtaccagaagacgatccgagcggcgtttgattttctcgatcggtcccagatcaacgagccgacggaggaaaattcctatcgagacgaccgcgtcggaggatggccctttagtaccaagacccaggggtatccagtctccgactgtactgccgaggctctcaaggccatcatcatggtccagaatacgcctggatacgaggatctgaagaaacaagtgtctgacaagcggaaacacactgccatcgatctacttttgggaatgcagaacgtgggctcgtttgaaccgggctctttcgcctcctatgagcctatccgggcgtcgtccatgctggagaagatcaatccggccgaggtgtttggaaacatcatggtggagtatccgtacgtggaatgcactgattctgttgttctgggtctgtcctactttcgaaagtaccacgattaccgcaacgaagacgtggaccgagccatctctgctgccattggatacattattcgagagcagcagcctgacggcggcttctttggctcctggggcgtgtgctactgctacgctcacatatttgccatggaggctctggagacgcagaatctcaactataacaactgttccacggttcaaaaggcgtgcgactttctggcgggctaccaggaagcagatggaggctgggccgaggactttaagtcgtgcgagactcagatgtacgtgcgcggaccccattcgctggtcgtgcctactgccatggccctgttgagtttgatgagtggtcggtatccccaggaggacaagattcatgctgcggcccggtttctcatgagcaagcagatgagcaacgatgagtggctcaaggaggagatggagggggtgtttaaccatacttgtgccattgagtatcccaactaccggttttattttgtcatgaaggctttggggttgtatttcaagggatattgccagtga

SEQ ID NO: 70 - DNA, 2229 bp, Artificial sequence
  Synthetic
atgggaatccacgaaagtgtgtcgaaacagtttgcgaaaaacggacattccaagtaccgcagcgaccgatacggcttacctaagacggatctgcgacgatggacgttccacgcgtccgatctgggggcgcaatggtggaagtatgacgataccacaccgctggaagagctggaaaagagggctaccgactacgtcaaatactcgctggagctgccgggatacgcgcccgtgactctggactccaagcccgtgaaaaatgcctacgaagcggctctcaaaaactggcatctgtttgcgtcgctgcaagaccccgactccggcgcgtggcagagcgaatacgacggaccgcagttcatgagcatcggctatgtgacggcgtgctactttggcggcaacgagatccccacgccggtcaaaaccgaaatgatcagatacattgtcaacacagcccacccagttgacggaggctggggccttcacaaagaagacaagagcacctgcttcggtaccagcatcaactacgtggtcctgcgactactgggcctgtcacgggaccatccggtctgcgtcaaggcgcgcaaaacgctgctcaccaagtttggcggcgccatcaacaacccccattggggcaagacctggctgtcgattctcaatctctacaaatgggagggtgtgaatccggcccctggcgagctctggctgttgccctactttgttcctgttcatccgggccgatggtgggtccatacccggtggatctaccttgccatgggctatctggaggctgcggaggcccaatgcgaactcactccgttgctggaggagctccgagacgaaatctacaaaaagccctactcggagattgatttctccaaacattgcaactccatctccggagtcgacctctactatccccacaccggccttttgaagtttggcaacgcgcttctccgacgataccgcaagttcagaccgcagtggatcaaagaaaaggtcaaggaggaaatttacaacttgtgccttcgagaggtttccaacacacgacacttgtgtctcgctcccgtcaacaatgccatgacctccattgtcatgtatctccatgaggggcccgtttcggcgaattacaaaaagattgcggcccgatggcccgaatttctgtctctgaatccgtcgggaatgtttatgaacggcaccaacggtctgcaggtctgggatactgcgtttgccgtgcaatacgcgtgtgtttgtggctttgccgaacttccccagtaccagaagacgatccgagcggcgtttgattttctcgatcggtcccagatcaacgagccgacggaggaaaattcctatcgagacgaccgcgtcggaggatggccctttagtaccaagacccaggggtatccagtctccgactgtactgccgaggctctcaaggccatcatcatggtccagaatacgcctggatacgaggatctgaagaaacaagtgtctgacaatcggaaacacactgccatcgatctacttttgggaatgcagaacgtgggctcgtttgaaccgggctctttcgcctcctatgagcctatccgggcgtcgtccatgctggagaagatcaatccggccgaggtgtttggaaacatcatggtggagtatccgtacgtggaatgcactgattctgttgttctgggtctgtcctactttcgaaagtaccacgattaccgcaacgaagacgtggaccgagccatctctgctgccattggatacattattcgagagcagcagcctgacggcggcttctttggctcctggggcgtgtgctactgctacgctcacatatttgccatggaggctctggagacgcagaatctcaactataacaactgttccacggttcaaaaggcgtgcgactttctggcgggctaccaggaagcagatggaggctgggccgaggactttaagtcgtgcgagactcagatgtacgtgcgcggaccccattcgctggtcgtgcctactgccatggccctgttgagtttgatgagtggtcggtatccccaggaggacaagattcatgctgcggcccggtttctcatgagcaagcagatgagcaacgatgagtggctcaaggaggagatggagggggtgtttaaccatacttgtgccattgagtatcccaactaccggttttattttgtcatgaaggctttggggttgtatttcaagggatattgccagtga

SEQ ID NO: 71 - DNA, 2229 bp, Artificial sequence
  Synthetic
atgggaatccacgaaagtgtgtcgaaacagtttgcgaaaaacggacattccaagtaccgcagcgaccgatacggcttacctaagacggatctgcgacgatggacgttccacgcgtccgatctgggggcgcaatggtggaagtatgacgataccacaccgctggaagagctggaaaagagggctaccgactacgtcaaatactcgctggagctgccgggatacgcgcccgtgactctgggctccaagctcgtgaaaaatgcctacgaagcggctctcaaaaactggcatctgtttgcgtcgctgcaagaccccgactccggcgcatggcagtcggaatacgacggaccgcagttcatgtcgatcggttatgtgacggcgtgctactttggcggcaacgagatccccacgccggtcaaaaccgaaatgatcagatacattgtcaacacagcccacccagttgacggaggctggggccttcacaaagaagacaagagcacctgtttcggtgccagcatcaactacgtggtcctgcgactactgggcctgtcacgggatcatccggtctgcgtcaaggcgcgcaaaacgctgctcatcaagtttggcggcgccatcaacaacccccattggggcaagacctggctgtcgattctcaatctctacaaatgggagggtgtgaatccgacccctggcgagctctggctgttgccctactttgttcctgttcatccgggccgatggtgggtccatacccggtggatctaccttgccatgggctatctggaggctgcggaggcccaatgcgaactcactccgttgctggaggagctccgagacgaaatctacaaaaagccctactcggagattgatttctccaaacattgcaactccatctccggagtcgacctctactatccccacaccggccttttgaagtttggcaacgcgcttctccgacgataccgcaagttcagaccgcagtggatcaaagaaaaggtcaaggaggaaatttacaacttgtgccttcgagaggtttccaacacacgacacttgtgtctcgctcccgtcaacaatgccatgacctccattgtcatgtatctccatgaggggcccgattcggcgaattacaaaaagattgcggcccgatggcccgaatttctgtctctgaatccgtcgggaatgtttatgaacggcaccaacggtctgcaggtctgggatactgcgtttgccgtgcaatacgcgtgtgtttgtggctttgccgaacttccccagtaccagaagacgatccgagcggcgtttgattttctcgatcggtcccagatcaacgagccgacggaggaaaattcctatcgagacgaccgcgtcggaggatggccctttagtaccaagacccaggggtatccagtctccgactgtactgccgaggctctcaaggccatcatcatggtccagaatacgcctggatacgaggatctgaagaaacaagtgtctgacaagcggaaacacactgccatcgatctacttttgggaatgcagaacgtgggctcgtttgaaccgggctctttcgcctcctatgagcctatccgggcgtcgtccatgctggagaagatcaatccggccgaggtgtttggaaacatcatggtggagtatccgtacgtggaatgcactgattctgttgttctgggtctgtcctactttcgaaagtaccacgattaccgcaacgaagacgtggaccgagccatctctgctgccattggatacattattcgagagcagcagcctgacggcggcttctttggctcctggggcgtgtgctactgctacgctcacatgtttgccatggaggctctggagacgcagaatctcaactataacaactgttccacggttcaaaaggcgtgcgactttctggcgggctaccaggaagcagatggaggctgggccgaggactttaagtcgtgcgagactcagatgtacgtgcgcggaccccattcgctggtcgtgcctactgccatggccctgttgagtttgatgagtggtcggtatccccaggaggacaagattcatgctgcggcccggtttctcatgagcaagcagatgagcaacggtgagtggctcaaggaggagatggagggggtgtttaaccatacttgtgccattgagtatcccaactaccggttttattttgtcatgaaggctttggggttgtatttcaagggatattgccagtga

SEQ ID NO: 72 - skipped

SEQ ID NO: 73 - DNA, 2229 bp, Artificial sequence
  Synthetic
atgggaatccacgaaagtgtgtcgaaacagtttgcgaaaaacggacattccaagtaccgcagcgaccgatacggcttacctaagacggatctgcgacgatggacgttccacgcgtccgatctgggggcgcaatggtggaagtatgacgataccacaccgctggaagagctggaaaagagggctaccgactacgtcaaatactcgctggagctgccgggatacgcgcccgtgactctggactccaagcccgtgaaaaatgcctacgaagcggctctcaaaaactggcatctgtttgcgtcgctgcaagaccccgactccggcgcgtggcagagcgaatacgacggaccgcagttcatgagcatcggctatgtgacggcgtgctactttggcggcaacgagatccccacgccggtcaaaaccgaaatgatcagatacattgtcaacacagcccacccagttgacggaggctggggccttcacaaagaagacaagagcacctgcttcggtaccagcatcaactacgtggtcctgcgactactgggcctgtcacgggatcatccggtctgcgtcaaggcgcgcaaaacgctgctcaccaagtttggcggcgccatcaacaacccccattggggcaagacctggctgtcgattctcaatctctacaaatgggagggtgtgaatccggcccctggcgagctctggctgttgccctactttgttcctgttcatccgggtcgatggtgggtccatacccggtggatctaccttgccatgggctatctggaggctgcggaggcccaatgcgaactcactccgttgctggaggagctccgagacgaaatctacaaaaagccctactcggagattgatttctccaaacattgcaactccatctccggagtcgacctctactatccccacaccggccttttgaagtttggcaacgcgcttctccgacgataccgcaagttcagaccgcagtggatcaaagaaaaggtcaaggaggaaatttacaacttgtgccttcgagaggtttccaacacacgacacttgtgtctcgctcccgtcaacaatgccatgtcctccattgtcatgtatctccatgaggggcccgatccggcgaattacaaaaagattgcggcccgatggcccgaatttctgtctctgaatccgtcgggaatgtttatgaacggcaccaacggtctgcaggtctgggatactgcgtttgccgtgcaatacgcgtgtgtttgtggctttgccgaacttccccagtaccagaagacgatccgagcggcgtttgattttctcgatcggtcccagatcaacgagccgatggaggaaaattcctatcgagacgaccgcgtcggaggatggccctttagtaccaagacccaggggtatccagtctccgactgtactgccgaggctctcaaggccatcatcatggtccagaatacacctggatacgaggatctgaagaaacaagtgtctgacaagcggaaacacactgccatcgatctacttttgggaatgcagaacgtgggctcgtttgaaccgggctctttcgcctcctatgagcctatccgggcgtcgtccatgctggagaagatcaatccggccgaggtgtttggaaacatcatggtggagtatccgtacgtggaatgcactgattctgttgttctgggtctctcctactttcgaaagtaccacgattaccgcaacgaagacgtggacccagccatctctgctgccattggatacattattcgagagcagcagcctgacggcggcttctttggctcctggggcgtgtgctactgctacgctcacatgtttgccatggaggctctggagacgcagaatctcaactataacaactgttccacggttcaaaaggcgtgcgactttctggcgggctaccaggaagcagatggaggctgggccgaggactttaagtcgtgcgagacccagatgtacgtgcgcggaccccattcgctggtcgtgcctactgccatggccctgttgagtttgatgagtggtcggtatccccaggaggacaagattcatgctgcggcccggtttctcatgagcaagcagatgagcaacggtgagtggctcaaggaggagatggagggggtgtttaaccatacttgtgccattgagtatcccaactaccggttttattttgtcatgaaggctttggggttgtatttcaagggatattgccagtga

SEQ ID NO: 74 - DNA, 2229 bp, Artificial sequence
  Synthetic
atgggaatccacgaaagtgtgtcgaaacagtttgcgaaaaacggacattccaagtaccgcagcgaccgatacggcttacctaagacggatctgcgacgatggacgttccacgcgtccgatctgggggcgcaatggtggaagtatgacggtaccacaccgctggaagagctggaaaagagggctaccgactacgtcagatactcgctggagctgccgggatacgcgcccgtgactctggactccaagcccgtgaaaaatgcctacgaagcggctctcaaaagctggcatctgtttgcgtcgctgcaagaccccgactccggcgcatggcagtcggaatacgacggaccgcagttcatgtcgatcggttatgtgacggcgtgctactttggcggcaacgagatccccacgccggtcaaaaccgaaatgatcagatacattgtcaacacagcccacccagttgacggaggctggggccttcacaaagaagacaagagcacctgtttcggtaccagcatcaactacgtggtcctgcgactactgggcctgtcacgggatcatccggtctgcgtcaaggcgcgcaaaacgctgctcaccaagtttggcggcgccatcaacaacccccattggggcaagacctggctgtcgattctcaatctctacaaatgggagggtgtgaatccggcccctggcgagctctggctgttgccctactttgttcctgttcatccgggccgatggtgggtccatacccggtggatctaccttgccatgggctatctggaggctgcggaggcccaatgcgaactcactccgttgctggaggagctccgagacgaaatctacaaaaagccctactcggagattgatttctccaaacattgcaactccatctccggagtcgacctctactatccccacaccggccttttgaagtttggcaacgcgcttctccgacgataccgcaagttcagaccgcagtggatcaaagaaaaggtcaaggaggaaatttacaacttgtgccttcgagaggtttccaacacacgacacttgtgtctcgctcccgtcaacaatgccatgacctccattgtcatgtatctccatgaggggcccgattcggcgaattacaaaaagattgcggcccgatggcccgaatttctgtctctgaatccgtcgggaatgtttatgaacggcaccaacggtctgcaggtctgggatactgcgtttgccgtgcaatacgcgtgtgtttgtagctttgccgaacttccccagtaccagaagacgatccgagcggcgtttgattttctcgatcggtcccagatcaacgagccgacggaggaaaattcctatcgagacgaccgcgtcggaggatggccctttagtaccaagacccaggggtatccagtctccgactgtactgccgaggctctcaaggccatcatcatggtccagaatacgcctggatacgaggatctgaagaaacaagtgtctgacaagcggaaacacactgccatcgatctacttttgggaatgcagaacgtgggctcgtttgaaccgggctctttcgcctcctatgagcctatccgggcgtcgtccatgctggagaagatcaatccggccgaggtgtttggaaacatcatggtggagtatccgtacgtggaatgcactgattctgttgttctgggtctgtcctactttcgaaagtaccacgattaccgcaacgaagacgtggaccgagccatctctgctgccatcggatacattattcgagagcagcagcctgacggtggcttctttggctcctggggcgtgtgctactgctacgctcacatgtttgccatggaggctctggtgacgcagaatctcaactataacaactgttccacggttcaaaaggcgtgcgactttctggcgggctaccaggaagcagatggaggctgggccgaggactttaagtcgtgcgagactcagatgtacgtgcgcggaccccattcgctggtcgtgcctactgccatggccctgttgagtttgatgagtggtcggtatccccaggaggacaagattcatgctgcggcccggtttctcatgagcaagcagatgagcaacggtgagtggctcaaggaggagatggagggggtgtttaaccatacttgtgccattgagtatcccaactaccggttttattttgtcatgaaggctttggggttgtatttcaagggatattgccagtga

SEQ ID NO: 75-77 - skipped (3 entries)

SEQ ID NO: 78 - DNA, 2229 bp, Artificial sequence
  Synthetic
atgggaatccacgaaagtgtgtcgaaacagtttgcgaaaaacggacattccaagtaccgcagcgaccgatacggcttacctaagacggatctgcgacgatggacgttccacgcgtccgatctgggggcgcaatggtggaagtatgacgataccacaccgctggaagagctggaaaagagggctaccgactacgtcaaatactcgctggagctgccgggatacgcgcccgtgactctggactccaagcccgtgaaaaatgcctacgaagcggctctcaaaaactggcatctgtttgcgtcgctgcaagaccccgactccggcgcatggcagtcggaatacgacggaccgcagttcatgtcgatcggttatgtgacggcgtgctactttggcggcaacgagatccccacgccggtcaaaaccgaaatgatcagatacattgtcaacacagcccacccagttgacggaggctggggccttcacaaagaagacaagagcacctgtttcggtaccagcatcaactacgtggtcctgcgactactgggcctgtcacgggatcatccggtctgcgtcaaggcgcgcaaaacgctgctcaccaagtttggcggcgccatcaacaacccccattggggcaagacctggctgtcgattctcaatctctacaaatgggagggtgtgaatccggcccctggcgagctctggctgttgccctactttgttcctgttcatccgggccgatggtgggtccatacccggtggatctaccttgccatgggctatctggaggctgcggaggcccaatgcgaactcactccgttgctggaggagctccgagatgaaatctacaaaaagccctactcggagattgatttctccaaacattgcaactccatctccggagtcgacctctactacccccacaccggctttttgaagtttggcaacgcgcttctccgacgataccgcaagttcagaccgcagtggatcaaagaaaaggtcaaggaggaaatttacaacttgtgccttcgagaggcttccaacacacgacacttgtgtctcgctcccgtcaacaatgccatgacctccattgtcatgtatctccatgaggggcccgattcggcgaattacaaaaagattgcggcccgatggcccgaatttctgtctctgaatccgtcgggaatgtttatgaacggcatcaacggtctgcaggtctgggatactgcgtttgccgtgcaatacgcgtgtgtttgtggctttgccgaacttccccagtaccagaagacgatccgagcggcgtttgattttctcgatcggtcccagatcaacgagccgacggaggaaaattcctatcgagacgaccgcgtcggaggatggccctttagtaccaagacccaggggtatccagtctccgactgtactgccgaggctctcaaggccatcatcatggtccagaatacgcctggatacgaggatctgaagaaacaagtatctgacaagcggaaacacactgccatcgatctacttttgggaatgcagaacgtgggctcgtttgaaccgggctctttcgcctcctatgagcctatccgggcgtcgtccatgctggagaagatcaatccggccgaggtgtttggaaacatcatggtggagtatccgtacgtggaatgcactgattctgttgttctgggtctgtcctactttcgaaagtaccacgattaccgtaacgaagacgtggaccgagccatctctgctgccattggatacattattcgagagcagcagcctgacggcggcttctttggctcctggggcgtgtgctactgctacgctcacatgtttgccatggaggctctggagacgcagaatctcaactataacaactgttccacggttcaaaaggcgtgcgactttctggcaggttaccaggaagcagatggaggctgggccgaggactttaagtcgtgcgagactcagatgtacgtgcgcggaccccattcgctggtcgtgcctactgccatggccctgttgagtttgatgagtggtcggtatccccaggaggacgagattcatgctgcggcccggtttctcatgagcaagcagatgagcaacggtgagtggctcaaggaggagatggagggggtgtttaaccatacttgtgccattgagtatcccaactaccggttttattttgtcatgaaggctttggggttgtatttcaagggatattgccagtga

SEQ ID NO: 79 - DNA, 2196 bp, Unknown
  Saccharomyces cerevisiae S288
atgacagaattttattctgacacaatcggtctaccaaagacagatccacgtctttggagactgagaactgatgagctaggccgagaaagctgggaatatttaacccctcagcaagccgcaaacgacccaccatccactttcacgcagtggcttcttcaagatcccaaatttcctcaacctcatccagaaagaaataagcattcaccagatttttcagccttcgatgcgtgtcataatggtgcatcttttttcaaactgcttcaagagcctgactcaggtatttttccgtgtcaatataaaggacccatgttcatgacaatcggttacgtagccgtaaactatatcgccggtattgaaattcctgagcatgagagaatagaattaattagatacatcgtcaatacagcacatccggttgatggtggctggggtctacattctgttgacaaatccaccgtgtttggtacagtattgaactatgtaatcttacgtttattgggtctacccaaggaccacccggtttgcgccaaggcaagaagcacattgttaaggttaggcggtgctattggatcccctcactggggaaaaatttggctaagtgcactaaacttgtataaatgggaaggtgtgaaccctgcccctcctgaaacttggttacttccatattcactgcccatgcatccggggagatggtgggttcatactagaggtgtttacattccggtcagttacctgtcattggtcaaattttcttgcccaatgactcctcttcttgaagaactgaggaatgaaatttacactaaaccgtttgacaagattaacttctccaagaacaggaataccgtatgtggagtagacctatattacccccattctactactttgaatattgcgaacagccttgtagtattttacgaaaaatacctaagaaaccggttcatttactctctatccaagaagaaggtttatgatctaatcaaaacggagttacagaatactgattccttgtgtatagcacctgttaaccaggcgttttgcgcacttgtcactcttattgaagaaggggtagactcggaagcgttccagcgtctccaatataggttcaaggatgcattgttccatggtccacagggtatgaccattatgggaacaaatggtgtgcaaacctgggattgtgcgtttgccattcaatactttttcgtcgcaggcctcgcagaaagacctgaattctataacacaattgtctctgcctataaattcttgtgtcatgctcaatttgacaccgagtgcgttccaggtagttatagggataagagaaagggggcttggggcttctcaacaaaaacacagggctatacagtggcagattgcactgcagaagcaattaaagccatcatcatggtgaaaaactctcccgtctttagtgaagtacaccatatgattagcagtgaacgtttatttgaaggcattgatgtgttattgaacctacaaaacatcggatcttttgaatatggttcctttgcaacctatgaaaaaatcaaggccccactagcaatggaaaccttgaatcctgctgaagtttttggtaacataatggtagaatacccatacgtggaatgtactgattcatccgttctggggttgacatattttcacaagtacttcgactataggaaagaggaaatacgtacacgcatcagaatcgccatcgaattcataaaaaaatctcaattaccagatggaagttggtatggaagctggggtatttgttttacatatgccggtatgtttgcattggaggcattacacaccgtgggggagacctatgagaattcctcaacggtaagaaaaggttgcgacttcttggtcagtaaacagatgaaggatggcggttggggggaatcaatgaagtccagtgaattacatagttatgtggatagtgaaaaatcgctagtcgttcaaaccgcatgggcgctaattgcacttcttttcgctgaatatcctaataaagaagtcatcgaccgcggtattgaccttttaaaaaatagacaagaagaatccggggaatggaaatttgaaagtgtagaaggtgttttcaaccactcttgtgcaattgaatacccaagttatcgattcttattccctattaaggcattaggtatgtacagcagggcatatgaaacacatacgctttaa

SEQ ID NO: 80 - DNA, 2178 bp, Artificial sequence
  Synthetic
atgacagaattttattctgacacaatcggtctaccaaagacagatccacgtctttggagactgagaactgatgagctaggccgagaaagctgggaatatttaacccctcagcaagccgcaaacgacccaccatccactttcacgcagtggcttcttcaagatcccaaatttcctcaacctcatccagaaagaaataagcattcaccagatttttcagccttcgatgcgtgtcataatggtgcatcttttttcaaactgcttcaagagcctgactcaggtatttttccgtgtcaatataaaggacccatgttcatgacaatcggttacgtagccgtaaactatatcgccggtattgaaatttctgagcatgagagaatagaattaattagatacatcgtcaatacagtacatccggttgatggtggctggggtctacattctgttgacaaatccaccgtgtttggtacagtattaaactatgtaatcttacgtttattgggtctacccaaggaccacccggtttgcgccaaggcaagaagcacattgttaaggttaggcggtgctattggatcccctcactggggaaaaatttggctaagtgcactaaacttgtataaatgggaaggtgtgaaccctgcccctcctgaaacttggttacttccatattcactgcccatgcatccggggagatggtgggttcatactagaggtgtttacattccggtcagttacctgtcattggtcaaattttcttgcccaatgactcctcttcttgaagaactgaggaatgaaatttacactaaaccgtttgacaagattaacttctccaagaacaggaataccgtatgtggagtagacctatattacccccattctactactttgaatattgcgaacggccttgtagtgttttacgaaaaatacctaagaaaccggttcatttactctctatccaagaagaagggttatgatctaatcaaaacggagttacagaatactgattccttgtgtatagcacctgttaaccaggcgttttgcgcacttgtcactcttattgaagaaggggtagactcggaagcgttccagcgtctccaatataggttcaaggatgcattgttccatggtccacagggtatgaccattatgggaacaaatggtgtgcaaacctgggattgtgcgtttgccattcaatactttttcgtcgcaggcctcgcagaaagacctgaattctataacacaattgtctctgcctataaattcttgtgtcatgctcaatttgacaccgagtgcgttccaggtagttatagggatgagagaaagggggcttggggcttctcaacaaaaacacagggctatacagtggcagattgcactgcagaagcaattaaagccatcatcatggtgaaaaactctcccgtctttagtgaagtacaccatatgattagcagtgaacgtttatttgaaggcattgatgtgttattgaacctacaaaacatcggatctttagaatatggttcctttgcaacctatgaaaaaatcaaggccccactagcaatggaaaccttgaatcctgctgaagtttttggtaacataatggtagaatacccatacgtggaatgtactgattcatccgttctggggttgacatattttcacaagtacttcgactataggaaagaggaaatacgtacacgcatcagaatcgccatcgaattcataaaaaaatctcaactaccagatggaagttggtatggaagctggggtatttgttttacatatgccggtatgtttgcattggaggcattacacaccgtgggggagacctatgagaattcctcaacggtaagaaaaggttgcgacttcttggtcagtaaacagatggaggatggcggttggggggaatcaatgaagtccagtgaattacatagttatgtggatagtgaaaaatcgctagtcgttcaaaccgcatgggcgctaattgcacttcttttcgctgaatatcctaataaagaagtcatcgaccgcggtattgaccttttaaaaaatagacaagaagaatccggggaatggaaatttgaaagtgtagaaggtgttttcaaccactcttgtgcaattgaatacccaagttatcgattcttattccctattaaggcattaggtatgtacagcagggcatag

SEQ ID NO: 81 - DNA, 2196 bp, Artificial sequence
  Synthetic
atgacagaattttattctgacacaatcggtctaccaaagacagatccacgtctttggagactgagaactgatgagctaggccgagaaagctgggaatatttaacccctcagcaagccgcaaacgacccaccatccactttcacgcagtggcttcttcaagatcccaaatttcctcaacctcatccagaaagaaataagcattcaccagatttttcagccttcgatgcgtgtcataatggtgcatcttttttcaaactgcttcaagagcctgactcaggtatttttccgtgtcaatataaaggacccatgttcatgacaatcggttacgtagctgtaaactatatcgccggtattgaaattcctgagcatgagagaatagaattaattagatacatcgtcaatacagcacatccggttgatggtggctggggtctacattctgttgacaaatccaccgtgtttggtacagtattgaactatgtaatcttacgtttattgggtctacccaaggaccacccggtttgcgccaaggcaagaagcacattgttaaggttaggcggtgctattggatcccctcactggggaaaaatttggctaagtgcactaaacttgtataaatgggaaggtgtgaaccctgcccctcctgaaacttggttacttccatattcactgcccatgcatccggggagatggtgggttcatactagaggtgtttacattccggtcagttacctgtcattggtcaaattttcttgcccaatgactcctcttcttgaagaactgaggaatgaaatttacactagtccgtttgacaagattaacttctccaagaacaggaatgccgtatgtggagtagacctatattacccccattctactactttgaatattgcgaacagccttgtagtattttacgaaaaatacctaagaaaccggttcatttactctctatccaagaagaaggtttatgatctaatcaaaacggagttacagaatactgattccttgtgtatagcacctgttaaccaggcgttttgcgcacttgtcactcttattgaagaaggggtagactcggaagcgttccagcgtctccaatataggttcaaggatgcattgttccatggtccacagggtatgaccattatgggaacaaatggtgtgcaaacctgggattgtgcgtttgccattcaatactttttcgtcgcaggcctcgcagaaagacctgaattctataacacaattgtctctgcctataaattcttgtgtcatgctcaatttgacaccgagtgcgttccaggtagttatagggataagagaaagggggcttggggcttctcaacaaaaacacagggctatacagtggcagattgcactgcagaagcaattaaagccatcatcatggtgaaaaactctcccgtctttagtgaagtacaccatatgattagcagtgaacgtttatttgaaggcattgatgtgttattgaacctacaaaacatcggatctcttgaatatggttcctttgcaacctatgaaaaaatcaaggccccactagcaatggaaaccttgaatcctgctgaagtttttggtaacataatggtagaatacccatacgtggaatgtactgattcatccgttctggggttgacatattttcacaagtacttcgactataggaaagaggaaatacgtacacgcatcagaatcgccatcgaattcataaaaaaatctcaattaccagatggaagttggtatggaagctggggtatttgttttacatatgccggtatgtttgcattggaggcattacacaacgtgggggagacctatgagaattcctcaacggtaagaaaaggttgcgacttcttggtcagtaaacagatgaaggatggcggttggggggaatcaatgaagtccagtgaattacatagttatgtggatagtgaaaaatcgctagtcgttcaaaccacatgggcgctaattgcacttcttttcgctgaatatcctaataaagaagtcatcgaccgcggtattgaccttttaaaaaatagacaagaagaatccggggaatggaaatttggaagtgtagaaggtgttttcaaccactcttgtgcaattgaatacccaagttatcgattcttattccctattaaggcattaggtatgtacagcagggcatatgaaacacatacgctttaa

SEQ ID NO: 82 - DNA, 2196 bp, Artificial sequence
  Synthetic
atgacagaattttattctgacacaatcggtctaccaaagacagatccacgtctttggagactgagaactgatgagctaggccgagaaagctgggaatatttaacccctcagcaagccgcaaacgacccaccatccactttcacgcagtggcttcttcaagatcccaaatttcctcaacctcatccagaaggaaataagcattcaccagatttttcagccttcgatgcgtgtcataatggtgcatcttttttcaaactgcttcaagagcctgactcaggtatttttccgtgtcaatataaaggacccatgttcatgacaatcggttacgtagccgtaaactatatcgccggtattgaagttcctgagcatgagagaatagaattaattagatacatcgtcaatacagcacatccggttgatggtggctggggtctacattctgttgacaaatccaccgtgtttggtacagtattgaactatgtaatcttacgtttattgggtctacccaaggaccacccggtttgcgccaaggcaagaagcacattgttaaggttaggcggtgctattggatcccctcactggggaaaaatttggctaagtgcactaaacttgtataaatgggaaggtgtgaaccctgcccctcctgaaacttggttacttccatattcactgcccattcatccggggagatggtgggttcatactagaggtgtttacattccggtcagttacctgtcattggtcaaattttcttgcccaatgactcctcttcttgaagaactgaggaatgaaatttacactaaaccgtttgacaagattaacatctccaagaacaggaataccgtatgtggagtagacctatattacccccattctactactttgaatattgcgaacagccttgtagtattttacgaaaaatacctaagaaaccggttcatttactctctatccaagaagaaggtttatgatctaatcaaaacggagttacagaatgctgattccttgtgtatagcacctgttaaccaggcgttttgcgcacttgtcactcttattgaagaaggggtagactcggaagcgttccagcgtctccaatataggttcaaggatgcattgttccatggtccacagggtatgaccattatgggaacaaatggtgtgcaaacctgggattgtgcgtttgccattcaatactttttcgtcgcaggcctcgcagaaagacctgaattctataacacaattgtctctgcctataaattcttgtgtcatgctcaatttgacaccgagtgcgttccaggtagttatagggataagagaaagggggcttggggcttctcaacaaaaacacagggctatacagtggcagattgcactgcagaagcaattaaagccatcatcatggtgaaaaactctcccgtctttagtgaagtacaccatatgattagcagtgaacgtttatttgaaggcattgatgtgttattgaacctacaaaacatcggatcttttgaatatggttcctttgcaacctatgaaaaaatcaaggccccactagcaatggaaaccttgaatcctgctgaagtttttggtaacataatggtagaatacccatacgtggaatgtactgattcatccgttctggggttgacatattttcacaagtacttcgactataggaaagaggaaatacgtacacgcatcagaatcgccatcgaattcataaaaaaatctcaattaccagatggaagttggtatggaagctggggtatttgttttacatatgccggtatgtttgcattggaggcattacacaccgtgggggagacctatgagaattcctcaacggtaagaaaaggtagcgacttcttggtcagtaaacagatgaaggatggcggttggggggaatcaatgaagtccagtgaattacatagttatgtggatagtgaaaaatcgctagtcgttcaaaccgcatgggcgctaattgcacttcttttcgctgaatatcctaataaagaagtcatcgaccgcggtattgaccttttaaaaaatagacaagaagaatccggggaatggaaatttgaaagtgtagaaggtgttttcaaccactcttgtgcaattgaatacccaagttatcgattcttattccctattaaggcattaggtatgtacagcagggcatatgaaacacatacgctttaa

SEQ ID NO: 83 - protein, 742 aa, Artificial sequence
  Synthetic
MGIHESVSKQFAKNGHSKYRSDRYGLPKTDLRRWTFHASDLGAQWWKYDDTTPLEELEKRATDYVKYSLELPGYAPVTLDSKPVKNAYEAALKNWHLFASLQDPDSGAWQSEYDGPQFMSIGYVTACYFGGNEIPTPVKTEMIRYIVNTAHPVDGGWGLHKEDKSTCFGTSINYVVLRLLGLSRDHPVCVKACKTLLTKFGGAINNPHWGKTWLSILNLYKWEGVNPAPGELWLLPYFVPVHPGRWWVHTRWIYLAMGYLEAAEAQCELTPLLEELRDEIYKKPYSEIGFSKHCITISGVDLYYPHTGLLKFGNALLRRYRKFRPQWIKEKVKEEIYNLCLREVSNTRHLCLAPVNNAMTSIVMYLHEGPDSANYKKIAARWPEFLSLNPSGMFMNGTNGLQVWDTAFAVQYACVCGFAELPQYQKTIRAAFDFLDRSQINEPTEENSYRDDRVGGWPFSTKTQGYPVSDCTAEALKAIIMVQNTPGYEDLKKQVSDKRKHTAIDLLLGMQNVGSFEPGSFASYEPIRASSMLEKINPAEVFGNIMVEYPYVECTDSVVLGLSYFRKYHDYRNEDVDRAISAAIGYIIREQQPDGGFFGSWGVCYCYAHMFAMEALETQSLNYNNCSTVQKACDFLAGYQEADGGWAEDFKSCETQMYVRGPHSLVVPTAMALLSLMSGRYPQEDKIHAAARFLMSKQMSNGEWLKEEMEGVFNHTCAIEYPNYRFYFVMKALGLFFKGYCQ

SEQ ID NO: 84 - protein, 742 aa, Artificial sequence
  Synthetic
MGIHESVSKQFAKNGHSKYRSDRYGLPKTDLRRWTFHASDLGAQWWKYDDTTPLEELEKRATDYVKYSLELPGYAPVTLDSKPVKNAYEAALKNWHLFASLQDPDSGAWQSEYDGPQFMSIGYVTACYFGGNEIPTPVKTEMIRYIVNTAHPVDGGWGLHKEDKSTCFGTSNNYVVLRLLGLSRDHPVCVKARKTLLTKFGGAINNPHWGKTWLSILNLYKWEGVNPAPGELWLLPYFVPVHPGRWWVHTRWIYLAMGYLEAAEAQCELTPLLEELRDEIYKKPYSEIDFSKHCNSISGVDLYYPHTGLLKFGNALLRRYRKFRPQWIKEKVKEEIYNLCLREVSNTRHLCLAPVNNAMTSIVMYLHEGPDSANYKKIAARWPEFLSLNPSGMFMNGTNGLQVWDTAFAVQYASVCGFAELPQYQKTIRAAFDFLDRSQINEPTEENSYRDDRVGGWPFSTKTQGYPVSDCTAEALKAIIMVQNTPGYEDLKKQVSDKRKHTAIDLLLGMQNVGSFEPGSFASYEPIRASSMLEKINPAEVFGNIMVEYPYVECTDSVVMGLSYFRKYHDYRNEDVDRAISAAIGYIIREQQPDGGFFGSWGVCYCYAHMFAMEALETQNLNYNNCSTVQKACDFLAGYQEADGGWAEDFKSCETQMYVRGPHSLVVPTAMALLSLMSSRYPQEDKIHAAARFLMSKQMSNGEWLKEEMEGVFNHTCAIEYPNYRFYFVMKALGLYFKGYCQ

SEQ ID NO: 85 - protein, 742 aa, Artificial sequence
  Synthetic
MGIHESVSKQFAKNGHSKYRSDRYGLPKTDLRRWTFHASDLGAQWWKYDDTTPLEELEKRATDYVKYSLELPGYAPVTLDSKPVKNAYEAALKNWHLFASLQDPDSGAWQSEYDGPQFMSIGYVTACYFGGNEIPTPVKTEMIRYIVNTAHPVDGGWGLHKEDKSTCFGTSINYVVLRLLGLSRDHPVCVKARKTLLTKFGGAINNPHWGKTWLSILNLYKWEGVNPAPGELWLLPYFVPVHPGRWWVHTRWIYLAMGYLEAAEAQCELTPLLEELRDEIYKKPYSEIDFSKHCNSISGVDLYYPHTGLLKFGNALLRRYRKFRPQWIKEKVKEEIYNLCLREVSNTRHLCLAPVNNAMTSIVMYLHEGPDSANYKKIAARWPEFLSLNPSGMFMNGTNGLQVWDTAFAVQYACVCGFAELPQYQKTIRAASDFLDRSQINEPTEENSYRDGRVGGWPFSTKTQGYPVSDCTAEALKAIIMVQNTPGYEDLKKQVSDKRKHTAIDLLLGMQNVGSFEPGSFASYEPIRASSMLEKFNPAEVFGNIMVEYPYVECTDSVVLGLSYFRKYHDYRNEDVDRAISAAIGYIIREQQPDGGFFGSWGVCYCYAHMFAMEALETQNLNYNNCSTVQKACDFLAGYQEADGGWAEDFKSCETQMYVRGPHSLVVPTAMALLSLMSGRYPQEDKIHAAARFLMSKQMSNGEWLKEEMEGVFNHTCAIEYPNYRFYFVMKALGLYFKGYCQ

SEQ ID NO: 86 - protein, 742 aa, Artificial sequence
  Synthetic
MGIHESVSKQFAKNGHSKYRSDRYGLPKTDLRRWTFHASDLGAQWWKYDDTTPLEELEKRATDYVKYSLELPGYAPVTLDSKPVNNAYEAALKNWHLFASLQDPDSGAWQSEYDGPQFMSIGYVTACYFGGNEIPTPVKTEMIRYIVNTAHPVDGGWSLHKEDKSTCFGTSINYVVLRLLGLSRDHPVCVKARKTLLTKFGGAINNPHWGKTWLSILNLYKWEGVNPAPGELWLLPYFVPVHPGRWWVHTRWIYLAMGYLEAAEAQCELTPLLEELRDEIYKKPYSEIDFSKHCNSISGVDLYYPHTGLLKFGNALLRRYRKFRPQWIKEKVKEEIYNLCLREVSNTRHLCLAPVNNAMTSIVMYLHEGPDSANYKKIAARWPEFLSLNPSGMFMNGTNGLQVWDTAFAVQYACVCGFAELPQYQKTIRAAFDFLDRSQINEPTEENSYRDDRVGGWPFSTKTQGYPVSDCTAEALKAIIMVQNTPGYEDLKKQVSDKRKHTAIDLLLGMQNVGSFEPGSFASYEPIRASSMLEKINPAEVFGNIMVEYPYVECTDSVVLGLSYFRKYHDYRNEDVDRAISAAIGYIIREQQPDGGFFGSWGVCYCYAHMFAMEALETQNLNYNNCSTVQKACDFLAGYQEADGGWAEDFKSCETQMYVRGPHSLVVPTAMALLSLMSGRYPQEDKIHAAARFLMSKQMSNGEWLKEEMEGVFNHTCAIEYPNYRFYFVMKALGLYFKGYCQ

SEQ ID NO: 87 - protein, 742 aa, Artificial sequence
  Synthetic
MGIHESVSKQFAKNGHSKYRSDRYGLPKTDLRRWTFHASDLGAQWWKYDDTTPLEELEKRATDYVKYSLELPGYAPVTLDSKPVKNAYEAALKNWHLFASLQDPDSGAWQSEYDGPQFMSIGYVTACYFGGNEIPTPVKTEMIRYIVNTAHPVDGGWGLHKEDKSTCFGTSINYVVLRLLGLSRDHPVCVKARKTLVTKFGGAINNPHWGKTWLSILNLYKWEGVNPAPGELWLLPYFVPVHPGRWWVHTRWIYLAMGYLEAAEAQCELTPLLEELRDEIYIKPYSEIDFSKHCNSISGVDLYYPHTGLLKFGSALLRRYRKFRPQWIKEKVKEEIYNLCLREVSNTRHLCLAPVNNAMTSIVMYLHEGLDSANYKKIAARWPEFLSLNPSGMFMNGTNGLQVWDTAFAVQYACVCGFAELPQYQKTIRAAFDFLDRSQINEPTEENSYRDDRVGGWPFSTKTQGYPVSDCTAEALKAIIMVQNTPGYEDLKKQVSDKRKHTAIDLLLGMQNVGSFEPGSFASYEPIRASSMLEKINPAEVFGNIMVEYPYVECTDSVVLGLSYFRKYHDYRNEDVDRAISAAIGYIIREQQPDGGFFGSWGVCYCYAHMFAMEALETQNLNYNNCSTVQKACDFLAGYQEADGGWAEDFKSCETQMYVRGPHSLVVPTAMALLSLMSGRYPQEDKIHAAARFLMSKQMSNGEWLKEEMEGVFNHTCAIEYPNYRFYFVMKALGLYFKGYCQ

SEQ ID NO: 88 - skipped

SEQ ID NO: 89 - protein, 742 aa, Artificial sequence
  Synthetic
MGIHESVSKQFAKNGHSKYRSDRYGLPKTDLRRWTFHASDLGAQWWKYDDTTPLEELEKRATDYVKYSLELPGYAPVTLDSKPVKNAYEAALKNWHLFASLQDPDSGAWQSEYDGPQFMSIGYVTACYFGGNEIPTPVKTEMIRYIVNTAHPVDGGWGLHKEDKSTCFGTSNNYVVLRLLGLSRDHPVCVKARKTLLTKFGGAINNPHWGKTWLSILNLYKWEGVNPAPGELWLLPYFVPVHPGRWWVHTRWIYLAMGYLEAAEAQCELTPLLEELRDEIYKKPYSEIDFSKHCNSISGVDLYYPHTGLLKFGNALLRRYRKFRPQWIKEKVKEEIYNLCLREVSNTRHLCLAPVNNAMTSIVMYLHEGPDSANYKKIAARWPEFLSLNPSGMFMNGTNGLQVWDTAFAVQYASVCGFAELPQYQKTIRAAFDFLDRSQINEPTEENSYRDDRVGGWPFSTKTQGYPVSDCTAEALKAIIMVQNTPGYEDLKKQVSDKRKHTAIDLLLGMQNVGSFEPGSFASYEPIRASSMLEKINPAEVFGNIMVEYPYVECTDSVVMGLSYFRKYHDYRNEDVDRAISAAIGYIIREQQPDGGFFGSWGVCYCYAHMFAMEALETQNLNYNNCSTVQKACDFLAGYQEADGGWAEDFKSCETQMYVRGPHSLVVPTAMALLSLMSGRYPQEDKIHAAARFLMSKQMSNGEWLKEEMEGVFNHTCAIEYPNYRFYFVMKALGLYFKGYCQ

SEQ ID NO: 90 - protein, 742 aa, Artificial sequence
  Synthetic
MGIHESVSKQFAKNGHSKYRSDRYGLPKTDLRRWTFHASDLGAQWWKYDDTTPLEELEKRATDYVKYSLELPGYAPVTLDSKPVKNAYEAALKNWHLFASLQDPDSGAWQSEYDGPQFMSIGYVTACYFGGNEIPTPVKTEMIRYIVNTAHPVDGGWGLHKEDKSTCFGTSINYVVLRLLGLSRDHPVCVKARKTLLTKFGGAINNPHWGKTWLSILNLYKWEGVNPAPGELWLLPYFVPVHPGRWWVHTRWIYLAMGYLEAAEAQCELTPLLEELRDEIYKKPYSEIDFSKHCNSISGVDLYYPHTGLLKFGNALLRRYRKFRPQWIKEKVKEEIYNLCLREVSNTRHLCLAPVNNAMTSIVMYLHEGPVSANYKKIAARWPEFLSLNPSGMFMNGTNGLQVWDTAFAVQYACVCGFAELPQYQKTIRAAFDFLDRSQINEPTEENSYRDDRVGGWPFSTKTQGYPVSDCTAEALKAIIMVQNTPGYEDLKKQVSDKRKHTAIDLLLGMQNVGSFEPGSFASYEPIRASSMLEKINPAEVFGNIMVEYPYVECTDSVVLGLSYFRKYHDYRNEDVDRAISAAIGYIIREQQPDGGFFGSWGVCYCYAHIFAMEALETQNLNYNNCSTVQKACDFLAGYQEADGGWAEDFKSCETQMYVRGPHSLVVPTAMALLSLMSGRYPQEDKIHAAARFLMSKQMSNDEWLKEEMEGVFNHTCAIEYPNYRFYFVMKALGLYFKGYCQ

SEQ ID NO: 91 - protein, 742 aa, Artificial sequence
  Synthetic
MGIHESVSKQFAKNGHSKYRSDRYGLPKTDLRRWTFHASDLGAQWWKYDDTTPLEELEKRATDYVKYSLELPGYAPVTLDSKPVKNAYEAALKNWHLFASLQDPDSGAWQSEYDGPQFMSIGYVTACYFGGNEIPTPVKTEMIRYIVNTAHPVDGGWGLHKEDKSTCFGTSINYVVLRLLGLSRDHPVCVKARKTLLTKFGGAINNPHWGKTWLSILNLYKWEGVNPAPGELWLLPYFVPVHPGRWWVHTRWIYLAMGYLEAAEAQCELTPLLEELRDEIYKKPYSEIDFSKHCNSISGVDLYYPHTGLLKFGNALLRRYRKFRPQWIKEKVKEEIYNLCLREVSNTRHLCLAPVNNAMTSIVMYLHEGPVSANYKKIAARWPEFLSLNPSGMFMNGTNGLQVWDTAFAVQYACVCGFAELPQYQKTIRAAFDFLDRSQINEPTEENSYRDDRVGGWPFSTKTQGYPVSDCTAEALKAIIMVQNTPGYEDLKKQVSDNRKHTAIDLLLGMQNVGSFEPGSFASYEPIRASSMLEKINPAEVFGNIMVEYPYVECTDSVVLGLSYFRKYHDYRNEDVDRAISAAIGYIIREQQPDGGFFGSWGVCYCYAHIFAMEALETQNLNYNNCSTVQKACDFLAGYQEADGGWAEDFKSCETQMYVRGPHSLVVPTAMALLSLMSGRYPQEDKIHAAARFLMSKQMSNDEWLKEEMEGVFNHTCAIEYPNYRFYFVMKALGLYFKGYCQ

SEQ ID NO: 92 - protein, 742 aa, Artificial sequence
  Synthetic
MGIHESVSKQFAKNGHSKYRSDRYGLPKTDLRRWTFHASDLGAQWWKYDDTTPLEELEKRATDYVKYSLELPGYAPVTLGSKLVKNAYEAALKNWHLFASLQDPDSGAWQSEYDGPQFMSIGYVTACYFGGNEIPTPVKTEMIRYIVNTAHPVDGGWGLHKEDKSTCFGASINYVVLRLLGLSRDHPVCVKARKTLLIKFGGAINNPHWGKTWLSILNLYKWEGVNPTPGELWLLPYFVPVHPGRWWVHTRWIYLAMGYLEAAEAQCELTPLLEELRDEIYKKPYSEIDFSKHCNSISGVDLYYPHTGLLKFGNALLRRYRKFRPQWIKEKVKEEIYNLCLREVSNTRHLCLAPVNNAMTSIVMYLHEGPDSANYKKIAARWPEFLSLNPSGMFMNGTNGLQVWDTAFAVQYACVCGFAELPQYQKTIRAAFDFLDRSQINEPTEENSYRDDRVGGWPFSTKTQGYPVSDCTAEALKAIIMVQNTPGYEDLKKQVSDKRKHTAIDLLLGMQNVGSFEPGSFASYEPIRASSMLEKINPAEVFGNIMVEYPYVECTDSVVLGLSYFRKYHDYRNEDVDRAISAAIGYIIREQQPDGGFFGSWGVCYCYAHMFAMEALETQNLNYNNCSTVQKACDFLAGYQEADGGWAEDFKSCETQMYVRGPHSLVVPTAMALLSLMSGRYPQEDKIHAAARFLMSKQMSNGEWLKEEMEGVFNHTCAIEYPNYRFYFVMKALGLYFKGYCQ

SEQ ID NO: 93 - skipped

SEQ ID NO: 94 - protein, 742 aa, Artificial sequence
  Synthetic
MGIHESVSKQFAKNGHSKYRSDRYGLPKTDLRRWTFHASDLGAQWWKYDDTTPLEELEKRATDYVKYSLELPGYAPVTLDSKPVKNAYEAALKNWHLFASLQDPDSGAWQSEYDGPQFMSIGYVTACYFGGNEIPTPVKTEMIRYIVNTAHPVDGGWGLHKEDKSTCFGTSINYVVLRLLGLSRDHPVCVKARKTLLTKFGGAINNPHWGKTWLSILNLYKWEGVNPAPGELWLLPYFVPVHPGRWWVHTRWIYLAMGYLEAAEAQCELTPLLEELRDEIYKKPYSEIDFSKHCNSISGVDLYYPHTGLLKFGNALLRRYRKFRPQWIKEKVKEEIYNLCLREVSNTRHLCLAPVNNAMSSIVMYLHEGPDPANYKKIAARWPEFLSLNPSGMFMNGTNGLQVWDTAFAVQYACVCGFAELPQYQKTIRAAFDFLDRSQINEPMEENSYRDDRVGGWPFSTKTQGYPVSDCTAEALKAIIMVQNTPGYEDLKKQVSDKRKHTAIDLLLGMQNVGSFEPGSFASYEPIRASSMLEKINPAEVFGNIMVEYPYVECTDSVVLGLSYFRKYHDYRNEDVDPAISAAIGYIIREQQPDGGFFGSWGVCYCYAHMFAMEALETQNLNYNNCSTVQKACDFLAGYQEADGGWAEDFKSCETQMYVRGPHSLVVPTAMALLSLMSGRYPQEDKIHAAARFLMSKQMSNGEWLKEEMEGVFNHTCAIEYPNYRFYFVMKALGLYFKGYCQ

SEQ ID NO: 95 - protein, 742 aa, Artificial sequence
  Synthetic
MGIHESVSKQFAKNGHSKYRSDRYGLPKTDLRRWTFHASDLGAQWWKYDGTTPLEELEKRATDYVRYSLELPGYAPVTLDSKPVKNAYEAALKSWHLFASLQDPDSGAWQSEYDGPQFMSIGYVTACYFGGNEIPTPVKTEMIRYIVNTAHPVDGGWGLHKEDKSTCFGTSINYVVLRLLGLSRDHPVCVKARKTLLTKFGGAINNPHWGKTWLSILNLYKWEGVNPAPGELWLLPYFVPVHPGRWWVHTRWIYLAMGYLEAAEAQCELTPLLEELRDEIYKKPYSEIDFSKHCNSISGVDLYYPHTGLLKFGNALLRRYRKFRPQWIKEKVKEEIYNLCLREVSNTRHLCLAPVNNAMTSIVMYLHEGPDSANYKKIAARWPEFLSLNPSGMFMNGTNGLQVWDTAFAVQYACVCSFAELPQYQKTIRAAFDFLDRSQINEPTEENSYRDDRVGGWPFSTKTQGYPVSDCTAEALKAIIMVQNTPGYEDLKKQVSDKRKHTAIDLLLGMQNVGSFEPGSFASYEPIRASSMLEKINPAEVFGNIMVEYPYVECTDSVVLGLSYFRKYHDYRNEDVDRAISAAIGYIIREQQPDGGFFGSWGVCYCYAHMFAMEALVTQNLNYNNCSTVQKACDFLAGYQEADGGWAEDFKSCETQMYVRGPHSLVVPTAMALLSLMSGRYPQEDKIHAAARFLMSKQMSNGEWLKEEMEGVFNHTCAIEYPNYRFYFVMKALGLYFKGYCQ

SEQ ID NO: 96-98 - skipped (3 entries)

SEQ ID NO: 99 - protein, 742 aa, Artificial sequence
  Synthetic
MGIHESVSKQFAKNGHSKYRSDRYGLPKTDLRRWTFHASDLGAQWWKYDDTTPLEELEKRATDYVKYSLELPGYAPVTLDSKPVKNAYEAALKNWHLFASLQDPDSGAWQSEYDGPQFMSIGYVTACYFGGNEIPTPVKTEMIRYIVNTAHPVDGGWGLHKEDKSTCFGTSINYVVLRLLGLSRDHPVCVKARKTLLTKFGGAINNPHWGKTWLSILNLYKWEGVNPAPGELWLLPYFVPVHPGRWWVHTRWIYLAMGYLEAAEAQCELTPLLEELRDEIYKKPYSEIDFSKHCNSISGVDLYYPHTGFLKFGNALLRRYRKFRPQWIKEKVKEEIYNLCLREASNTRHLCLAPVNNAMTSIVMYLHEGPDSANYKKIAARWPEFLSLNPSGMFMNGINGLQVWDTAFAVQYACVCGFAELPQYQKTIRAAFDFLDRSQINEPTEENSYRDDRVGGWPFSTKTQGYPVSDCTAEALKAIIMVQNTPGYEDLKKQVSDKRKHTAIDLLLGMQNVGSFEPGSFASYEPIRASSMLEKINPAEVFGNIMVEYPYVECTDSVVLGLSYFRKYHDYRNEDVDRAISAAIGYIIREQQPDGGFFGSWGVCYCYAHMFAMEALETQNLNYNNCSTVQKACDFLAGYQEADGGWAEDFKSCETQMYVRGPHSLVVPTAMALLSLMSGRYPQEDEIHAAARFLMSKQMSNGEWLKEEMEGVFNHTCAIEYPNYRFYFVMKALGLYFKGYCQ

SEQ ID NO: 100 - protein, 725 aa, Artificial sequence
  Synthetic
MTEFYSDTIGLPKTDPRLWRLRTDELGRESWEYLTPQQAANDPPSTFTQWLLQDPKFPQPHPERNKHSPDFSAFDACHNGASFFKLLQEPDSGIFPCQYKGPMFMTIGYVAVNYIAGIEISEHERIELIRYIVNTVHPVDGGWGLHSVDKSTVFGTVLNYVILRLLGLPKDHPVCAKARSTLLRLGGAIGSPHWGKIWLSALNLYKWEGVNPAPPETWLLPYSLPMHPGRWWVHTRGVYIPVSYLSLVKFSCPMTPLLEELRNEIYTKPFDKINFSKNRNTVCGVDLYYPHSTTLNIANGLVVFYEKYLRNRFIYSLSKKKGYDLIKTELQNTDSLCIAPVNQAFCALVTLIEEGVDSEAFQRLQYRFKDALFHGPQGMTIMGTNGVQTWDCAFAIQYFFVAGLAERPEFYNTIVSAYKFLCHAQFDTECVPGSYRDERKGAWGFSTKTQGYTVADCTAEAIKAIIMVKNSPVFSEVHHMISSERLFEGIDVLLNLQNIGSLEYGSFATYEKIKAPLAMETLNPAEVFGNIMVEYPYVECTDSSVLGLTYFHKYFDYRKEEIRTRIRIAIEFIKKSQLPDGSWYGSWGICFTYAGMFALEALHTVGETYENSSTVRKGCDFLVSKQMEDGGWGESMKSSELHSYVDSEKSLVVQTAWALIALLFAEYPNKEVIDRGIDLLKNRQEESGEWKFESVEGVFNHSCAIEYPSYRFLFPIKALGMYSRA

SEQ ID NO: 101 - protein, 731 aa, Artificial sequence
  Synthetic
MTEFYSDTIGLPKTDPRLWRLRTDELGRESWEYLTPQQAANDPPSTFTQWLLQDPKFPQPHPERNKHSPDFSAFDACHNGASFFKLLQEPDSGIFPCQYKGPMFMTIGYVAVNYIAGIEIPEHERIELIRYIVNTAHPVDGGWGLHSVDKSTVFGTVLNYVILRLLGLPKDHPVCAKARSTLLRLGGAIGSPHWGKIWLSALNLYKWEGVNPAPPETWLLPYSLPMHPGRWWVHTRGVYIPVSYLSLVKFSCPMTPLLEELRNEIYTSPFDKINFSKNRNAVCGVDLYYPHSTTLNIANSLVVFYEKYLRNRFIYSLSKKKVYDLIKTELQNTDSLCIAPVNQAFCALVTLIEEGVDSEAFQRLQYRFKDALFHGPQGMTIMGTNGVQTWDCAFAIQYFFVAGLAERPEFYNTIVSAYKFLCHAQFDTECVPGSYRDKRKGAWGFSTKTQGYTVADCTAEAIKAIIMVKNSPVFSEVHHMISSERLFEGIDVLLNLQNIGSLEYGSFATYEKIKAPLAMETLNPAEVFGNIMVEYPYVECTDSSVLGLTYFHKYFDYRKEEIRTRIRIAIEFIKKSQLPDGSWYGSWGICFTYAGMFALEALHNVGETYENSSTVRKGCDFLVSKQMKDGGWGESMKSSELHSYVDSEKSLVVQTTWALIALLFAEYPNKEVIDRGIDLLKNRQEESGEWKFGSVEGVFNHSCAIEYPSYRFLFPIKALGMYSRAYETHTL

SEQ ID NO: 102 - protein, 731 aa, Artificial sequence
  Synthetic
MTEFYSDTIGLPKTDPRLWRLRTDELGRESWEYLTPQQAANDPPSTFTQWLLQDPKFPQPHPEGNKHSPDFSAFDACHNGASFFKLLQEPDSGIFPCQYKGPMFMTIGYVAVNYIAGIEVPEHERIELIRYIVNTAHPVDGGWGLHSVDKSTVFGTVLNYVILRLLGLPKDHPVCAKARSTLLRLGGAIGSPHWGKIWLSALNLYKWEGVNPAPPETWLLPYSLPIHPGRWWVHTRGVYIPVSYLSLVKFSCPMTPLLEELRNEIYTKPFDKINISKNRNTVCGVDLYYPHSTTLNIANSLVVFYEKYLRNRFIYSLSKKKVYDLIKTELQNADSLCIAPVNQAFCALVTLIEEGVDSEAFQRLQYRFKDALFHGPQGMTIMGTNGVQTWDCAFAIQYFFVAGLAERPEFYNTIVSAYKFLCHAQFDTECVPGSYRDKRKGAWGFSTKTQGYTVADCTAEAIKAIIMVKNSPVFSEVHHMISSERLFEGIDVLLNLQNIGSFEYGSFATYEKIKAPLAMETLNPAEVFGNIMVEYPYVECTDSSVLGLTYFHKYFDYRKEEIRTRIRIAIEFIKKSQLPDGSWYGSWGICFTYAGMFALEALHTVGETYENSSTVRKGSDFLVSKQMKDGGWGESMKSSELHSYVDSEKSLVVQTAWALIALLFAEYPNKEVIDRGIDLLKNRQEESGEWKFESVEGVFNHSCAIEYPSYRFLFPIKALGMYSRAYETHTL

SEQ ID NO: 103 - DNA, 2229 bp, Artificial sequence
  Synthetic
atgggaatccacgaaagtgtgtcgaaacagtttgcgaaaaacggacattccaagtaccgcagcgaccgatacggcttacctaagacggatctgcgacgatggacgttccacgcgtccgatctgggggcgcaatggtggaagtatgacgataccacaccgctggaagagctggaaaagagggctaccgactacgtcaaatactcgctggagctgccgggatacgcgcccgtgactctggactccaagcccgtgaaaaatgcctacgaagcggctctcaaaaactggcatctgtttgcgtcgctgcaagaccccgactccggcgcatggcagtcggaatacgacggaccgcagttcatgtcgatcggttatgtgacggcgtgctactttggcggcaacgagatccccacgccggtcaaaaccgaaatgatcagatacattgtcaacacagcccacccagttgacggaggctggggccttcacaaagaagacaagagcacctgtttcggtaccagcatcaactacgtggtcctgcgactactgggcctgtcacgggatcatccggtctgcgtcaaggcgcgcaaaacgctgctcaccaagtttggcggcgccatcaacaacccccattggggcaagacctggctgtcgattctcaatctctacaaatgggagggtgtgaatccggcccctggcgagctctggctgttgccctactttgttcctgttcatccgggccgatggtggttccatacccggtggatctaccttgccatgggctatctggaggctgcggaggcccaatgcgaactcactccgttgctggaggagctccgagacgaaatctacaaaaagccctactcggagattgatttctccaaacattgcaactccatctccggagtcgacctctactatccccacaccggccttttgaagtttggcaacgcgcttctccgacgataccgcaagttcagaccgcagtggatcaaagaaaaggtcaaggaggaaatttacaacttgtgccttcgagaggtttccaacacacgacacttgtgtctcgctcccgtcaacaatgccatgacctccattgtcatgtatctccatgaggggcccgtttcggcgaattacaaaaagattgcggcccgatggcccgaatttctgtctctgaatccgtcgggaatgtttatgaacggcaccaacggtctgcaggtctgggatactgcgtttgccgtgcaatacgcgtgtgtttgtggctttgccgaacttccccagtaccagaagacgatccgagcggcgtttgattttctcgatcggtcccagatcaacgagccgacggaggaaaattcctatcgagacgaccgcgtcggaggatggccctttagtaccaagacccaggggtatccagtctccgactgtactgccgaggctctcaaggccatcatcatggtccagaatacgcctggatacgaggatctgaagaaacaagtgtctgacaagcggaaacacactgccatcgatctacttttgggaatgcagaacgtgggctcgtttgaaccgggctctttcgcctcctatgagcctatccgggcgtcgtccatgctggagaagatcaatccggccgaggtgtttggaaacatcatggtggagtatccgtacgtggaatgcactgattctgttgttctgggtctgtcctactttcgaaagtaccacgattaccgcaacgaagacgtggaccgagccatctctgctgccattggatacattattcgagagcagcagcctgacggcggcttctttggctcctggggcgtgtgctactgctacgctcacatgtttgccatggaggctctggagacgcagaatctcaactataacaactgttccacggttcaaaaggcgtgcgactttctggcgggctaccaggaagcagatggaggctgggccgaggactttaagtcgtgcgagactcagatgtacgtgcgcggaccccattcgctggtcgtgcctactgccatggccctgttgagtttgatgagtggtcggtatccccaggaggacaagattcatgctgcggcccggtttctcatgagcaagcagatgagcaacgatgagtggctcaaggaggagatggagggggtgtttaaccatacttgtgccattgagtatcccaactaccggttttattttgtcatgaaggctttggggttgtatttcaagggatattgccagtga

SEQ ID NO: 104 - DNA, 2229 bp, Artificial sequence
  Synthetic
atgggaatccacgaaagtgtgtcgaaacagtttgcgaaaaacggacattccaagtaccgcagcgaccgatacggcttacctaagacggatctgcgacgatggacgttccacgcgtccgatctgggggcgcaatggtggaagtatgacgataccacaccgctggaagagctggaaaagagggctaccgactacgtcaaatactcgctggagctgccgggatacgcgcccgtgactctggactccaagcccgtgaaaaatgcctacgaagcggctctcaaaaactggcatctgtttgcgtcgctgcaagaccccgactccggcgcatggcagtcggaatacgacggaccgcagttcatgtcgatcggttatgtgacggcgtgctactttggcggcaacgagatccccacgccggtcaaaaccgaaatgatcagatacattgtcaacacagcccacccagttgacggaggctggggccttcacaaagaagacaagagcacctgtttcggtaccagcatcaactacgtggtcctgcgactactgggcctgtcatgggatcatccggtctgcgtcaaggcgcgcaaaacgctgctcaccaagtttggcggcgccatcaacaacccccattggggcaagacctggctgtcgattctcaatctctacaaatgggagggtgtgaatccggcccctggcgagctctggctgatgccctactttgttcctgttcatccgggccgatggtgggtccatacccggtggatctaccttgccatgggctatcgggaggctgcggaggcccaatgcgaactcactccgttgctggaggagctccgagacgaaatctacaaaaagccctactcggagattgatttctccaaacattgcaactccatctccggagtcgacctctactatccccacaccggccttttgaagtttggcaacgcgcttctccgacgataccgcaagttcagaccgcagtggatcaaagaaaaggtcaaggaggaaatttacaacttgtgccttcgagaggtttccaacacacgacacttgtgtctcgctcccgtcaacaatgccatgacctccattgtcatgtatctccatgaggggcccgattcggcgaattacaaaaagattgcggcccgatggcccgaatttctgtctctgaatccgtcgggaatgtttatgaacggcaccaacggtctgcaggtctgggatactgcgtttgccgtgcaatacgcgtgtgtttgtggctttgccgaacttccccagtaccagaagacgatccgagcggcgtttgattttctcgatcggtcccagatcaacgagccgacggaggaaaattcctatcgagacgaccgcgtcggaggatggccctttagtaccaagacccaggggtatccagtctccgactgtactgccgaggctctcaaggccatcatcatggtccagaatacgcctggatacgaggatctgaagaaacaagtgtctgacaagcggaaacacactgccatcgatctacttttgggaatgcagaacgtgggctcgtttgaaccgggctctttcgcctcctatgagcctatccgggcgtcgtccatgctggagaagatcaatccggccgaggtgtttggaaacatcatggtggagtatccgtacgtggaatgcactgattctgttgttctgggtctgtcctactttcgaaagtaccacgattaccgcaacgaagacgtggaccgagccatctctgctgccattggatacattattcgagagcagcagcctgacggcggcttctttggctcctggggcgtgtgctactgctacgctcacatgtttgccatggaggctctggagacgcagaatctcaactataacaactgttccacggttcaaaaggcgtgcgactttctggcgggctaccaggaagcagatggaggctgggccgaggactttaagtcgtgcgagactcagatgtacgtgcgcggaccccattcgctggtcgtgcctactgccatggccctgttgagtttgatgagtggtcggtatccccaggaggacaagattcatgctgcggcccggtttctcatgagcaagcagatgagcaacggtgagtggctcaaggaggagatgcagggggtgtttaaccatacttgtgccattgagtatcccaactaccggttttattttgtcatgaaggctttggggttgtatttcaagggatattgccagtga

SEQ ID NO: 105 - DNA, 2229 bp, Artificial sequence
  Synthetic
atgggaatccacgaaagtgtgtcgaaacagtttgcgaaaaacggacattccaagtaccgcagcgaccgatacggcttacctaagacggatctgcgacgatggacgttccacgcgtccgatctgggggcgcaatggtggaagtatgacgataccacaccgctggaagagctggaaaagagggctaccgactacgtcaaatactcgctggagctgccgggatacgcgcccgtgactctggactccaagcccgtgaaaaatgcctacgaagcggctctcaaaaactggcatctgtttgcgtcgctgcaagaccccgactccggcgcatggcagtcggaatacgacggaccgcagttcatgtcgatcggttatgtgacggcgtgctactttggcggcaacgagatccccacgccggtcaaaaccgaaatgatcagatacattgtcaacacagcccacccagttgacggaggctggggccttcacaaagaagacaagagcacctgtttcggtaccagcatcaactacgtggtcctgcgactactgggcctgtcacgggatcatccggtctgcgtcaaggcgcgcaaaacgctgctcaccaagtttggcggcgccatcaacaacccccattggggcaagacctggctgtcgattctcaatctctacaaatgggagggtgtgaatccggcccctggcgagctctggctgttgccctactttgttcctgttcatccgggccgatggtgggtccacacccggtggatctaccttgccatgggctatctggaggctgcggaggcccaatgcgaactcactccgttgctggaggagctccgagacgaaatctacaaaaagccctactcggagattgatttctccaaacattgcaactccatctccggagtcgacctctactatccccacaccggccttttgaagtttggcaacgcgcttctcagacgataccgcaagttcagaccgcagtggatcaaagaaaaggtcaaggaggaaatttacaacttgtgccttcgagaggtttccaacacacgacacttgtgtctcgctcccgtcaacaatgccatgacctccattgtcatgtatctccatgaggggcccgattcggcgaattacaaaaagattgcggcccgatggcccgaatttctgtctctgaatccgtcgggaatgtttatgaacggcaccaacggtctgcaggtctgggatactgcgtttgccgtgcaatacgcgtgtgtttgtggctttgccgaacttccccagtaccagaagacgatccgagcggcgtttgattttctcgatcggtcccagatcaacgagccgacggaggaaaattcctatcgagacgaccgcgtcggaggatggccctttagtaccaagacccaggggtatccagtctccgactgtactgccgaggctctcaaggccatcatcatggtccagaatacgcctggatacgaggatcagaagaaacaagtgtctgacaagcggaaacacactgccatcgatctacttttgggaatgcagaacgtgggctcgtttgaaccgggctctttcgcctcctatgagcctatccgggcgtcgtccatgctggagaagatcaatccggccgaggtgtttggaaacatcatggtggagtatccgtacgtggaatgcactgattctgttgttctgggtctgtcctactttcgaaagtaccacgattaccgcaacgaagacgtggaccgagccatctctgctgccattggattcattattcgagagcagcagcctgacggcggcttctttggctcctggggcgtgtgctactgctacgctcacatgtttgccatggaggctctggagacgcagaatctcaactataacaactgttccacggttcaaaaggcgtgcgactttctggcgggctaccaggaagcagatggaggctgggccgaggactttaagtcgtgcgagactcagatgtacgtgcacggaccccattcgctggtcgtgcctactgccatggccctgttgagtttgatgagtggtcggtatccccaggaggacaagattcatgctgcggcccggtttctcatgagcaagcagatgagcaacggtgagtggctcaaggaggagatggagggggtgtttaaccatacttgtgccattgagtatcccaactaccggttttattttgtcatgaaggctttggggttgtatttcaagggatattgccagtga

SEQ ID NO: 106 - DNA, 2229 bp, Artificial sequence
  Synthetic
atgggaatccacgaaagtgtgtcgaaacagtttgcgaaaaacggacattccaagtaccgcagcgaccgatacggcttacctaagacggatctgcgacgatggacgttccacgcgtccgatctgggggcgcaatggtggaagtatgacgataccacaccgctggaagagctggaaaagagggctactgactacgtcaaatactcgctggagctgccgggatacgcgcccgtgactctggactccaagcccgtgaagaatgcctacgaagcggctctcaaaaactggcatctgtttgcgtcgctgcaagaccccgactccggcgcatggcagtcggaatacgacggaccgcagttcatgtcgatctgttatgtgacggcgtgctactttggcggcaacgagatccccacgccggtcaaaaccgaaatgatcagatacattgtcaacacagcccacccagttgacggaggctggggccttcacaaagaagacaagagcacctgtttcggtaccagcatcaactacgtggtcctgcgactactgggcctgtcacgggatcatccggtctgcgtcaaggcgcgcaaaacgctgctcaccaagtttggcggcgccatcaacaacccccattggggcaagacctggctgtcgattctcaatctctacaaatgggagggtgtgaatccggcccctggcgagctctggctgttgccctactttgttcctgttcatccgggccgatggtgggtccttacccggtggatctaccttgccatgggctatctggaggctgcggaggcccaatgcgaactcactccgttgctggaggagctccgagacgaaatctacaaaaagccctactcggagattgatttctccaaacattgcaactccatctccggagtcgacctctactatccccacaccggccttttgaagtttggcaacgcgcttctccgacgataccgcaagttcagaccgcagtggatcaaagaaaaggtcaaggaggaaatttacaacttgtgccttcgagaggtttccaacacacgacacttgtgtctcgctcccgtcaacaatgccatgacctccattgtcatgtatctccatgaggggcccgattcggcgaattacaaaaagattgcggcccgatggcccgaatttctgtctctgaatccgtcgggaatgtttatgaacggcaccaacggtctgcaggtctgggatactgcgtttgccgtgcaatacgcgtgtgtttgtggctttgccgaacttccccagtaccagaagacgatccgagcggcgtttgattttctcgatcggtcccagatcaacgagccgacggaggaaaattcctatcgagacgaccgcgtcggaggatggccctttagtaccaagacccaggggtatccagtctccgactgtactgccgaggctctcaaggccatcatcatggtccagaatacgcctggatacgaggatctgaagaaacaagtgtctgacaagcggaaacacactgccatcgatctacttttgggaatgcagaacgtgggctcgtttgaaccgggctctttcgcctcctatgagcctatccgggcgtcgtccatgctggagaagatcaatccggccgaggtgtttggaaacatcatggtggagtatccgtacgtggaatgcactgattctgttgttctgggtctgtcctactttcgaaagtaccacgattaccgcaacgaagacgtggaccgagccatctctgctgccattggatacattattcgagagcagcagcctgacggcggcttctttggctcctggggcgtgtgctactgctacgctcacatgtttgccatggaggctctggagacgcagaatctcaactataacaactgttccacggttcaaaaggcgtgcgactttctggcgggctaccaggaagcagatggaggctgggccgaggactttaagtcgtgcgagactcagatgtacgtgcgcggaccccattcgctggtcgtgcctactgccatggccctgttgagtttgatgagtggtcggtatccccaggaggacaagattcatgctgcggcccggtttctcatgagcaagcagatgagcaacggtgagtggctcaaggaggagatggagggggtgtttaaccatacttgtgccattgagtatcccaactaccggttttattttgtcatgaaggctttggggttgtatttcatgggatattgccagtga

SEQ ID NO: 107 - DNA, 2229 bp, Artificial sequence
  Synthetic
atgggaatccacgaaagtgtgtcgaaacagtttgcgaaaaacggacattccaagtaccgcagcgaccgatacggcttacctaagacggatctgcgacgatggacgttccacgcgtccgatctgggggcgcaatggtggaagtatgacgataccacaccgctggaagagctggaaaagagggctactgactacgtcaaatactcgctggagctgccgggatacgcgcccgtgactctggactccaagcccgtgaagaatgcctacgaagcggctctcaaaaactggcatctgtttgcgtcgctgcaagaccccgactccggcgcatggcagtcggaatacgacggaccgcagttcatgtcgatctgttatgtgacggcgtgctactttggcggcaacgagatccccacgccggtcaaaaccgaaatgatcagatacattgtcaacacagcccacccagttgacggaggctggggccttcacaaagaagacaagagcacctgtttcggtaccagcatcaactacgtggtcctgcgactactgggcctgtcacgggatcatccggtctgcgtcaaggcgcgcaaaacgctgctcaccaagtttggcggcgccatcaacaacccccattggggcaagacctggctgtcgattctcaatctctacaaatgggagggtgtgaatccggcccctggcgagctctggctgttgccctactttgttcctgttcatccgggccgatggtgggtccttacccggtggatctaccttgccatgggctatctggaggctgcggaggcccaatgcgaactcactccgttgctggaggagctccgagacgaaatctacaaaaagccctactcggagattgatttctccaaacattgcaactccatctccggagtcgacctctactatccccacaccggccttttgaagtttggcaacgcgcttctccgacgataccgcaagttcagaccgcagtggatcaaagaaaaggtcaaggaggaaatttacaacttgtgccttcgagaggtttccaacacacgacacttgtgtctcgctcccgtcaacaatgccatgacctccattgtcatgtatctccatgaggggcccgattcggcgaattacaaaaagattgcggcccgatggcccgaatttctgtctctgaatccgtcgggaatgtttatgaacggcaccaacggtctgcaggtctgggatactgcgtttgccgtgcaatacgcgtgtgtttgtggctttgccgaacttccccagtaccagaagacgatccgagcggcgtttgattttctcgatctgtcccagatcaacgagccgacggaggaaaattcctatcgagacgaccgcgtcggaggatggccctttagtaccaagacccaggggtatccagtctccgactgtactgccgaggctctcaaggccatcatcatggtccagaatacgcctggatacgaggatctgaagaaacaagtgtctgacaagcggaaacacactgccatcgatctacttttgggaatgcagaacgtgggctcgtttgaaccgggctctttcgcctcctatgagcctatccgggcgtcgtccatgctggagaagatcaatccggccgaggtgtttggaaacatcatggtggagtatccgtacgttgaatgcactgattctgttgttctgggtctgtcctactttcgaaagtaccacgattaccgcaacgaagacgtggaccgagccatctctgctgccattggatacattattcgagagcagcagcctgacggcggcttctttggctcctggggcgtgtgctactgctacgctcacatgtttgccatggaggctctggagacgcagaatctcaactataacaactgttccacggttcaaaaggcgtgcgactttctggcgggctaccaggaagcagatggaggctgggccgaggactttaagtcgtgcgagactcagatgtacgtgcgcggaccccattcgctggtcgtgcctactgccatggccctgttgagtttgatgagtggtcggtatccccaggaggacaagattcatgctgcggcccggtttctcatgagcaagcagatgagcaacggtgagtggctcaaggaggagatggagggggtgtttaaccatacttgtgccattgagtatcccaactaccggttttattttgtcatgaaggctttggggttgtatttcatgggatattgccagtga

SEQ ID NO: 108 - DNA, 2229 bp, Artificial sequence
  Synthetic
atgggaatccacgaaagtgtgtcgaaacagtttgcgaaaaacggacattccaagtaccgcagcgaccgatacggcttacctaagacggatctgcgacgatggacgttccacgcgtccgatctgggggcgcaatggtggaagtatgacgataccacaccgctggaagagctggaaaagagggctaccgactacgtcaaatactcgctggagctgccgggatacgcgcccgtgactctggactccaagcccgtgaaaaatgcctacgaagcggctctcaaaaactggcatctgtttgcgtcgctgcaagaccccgactccggcgcatggcagtcggaatacgacggaccgcagttcatgtcgatcggttatgtgacggcgtgctactttggcggcaacgagatccccacgccggtcaaaaccgaaatgatcagatacattgtcaacacagcccacccagttgacggaggctggggccttcacaaagaagacaagagcacctgtttcggtaccagcatcaactacgtggtcctgcgactactgggcctgtcacgggatcatccggtctgcgtcaaggcgcgcaaaacgctgctcaccaagtttggcggcgctatcaacaacccccattggggcaagacctggctgtcgattctcaatctctacaaatgggagggtgtgaatctggcccctggcgagctctggctgttgccctactttgttcctgttcatccgggccgatggtgggtccatacccggtggatctaccttgccatgggctatctggaggctgcggaggcccaatgcgaactcactccgttgctggaggagctccgagacgaaatctacaaaaagccctactcggagattgatttctccaaacattgcaactccatctccggagtcgacctctactatccccacaccggccttttgaagtttggcaacgcgcttctccgacgataccgcaagttcagaccgcagtggatcaaagaaaaggtcaaggaggaaatttacaacttgtgccttcgagaggtttccaacacacgacacttgtgtctcgctcccgtcaacaatgccatgacctccattgtcatgtatctccatgaggggcccgattcggcgaattacaaaaagattgcggcccgatggcccgaatttctgtctctgaatccgtcgggaatgtttatgaacggcaccaacggtctgcaggtctgggatactgcgtttgccgtgcaatacgcgtgtgtttgtggctttgccgaacttccccagtaccagaagacgatccgagcggcgtttgattttctcgatcggtcccagatcaacgagccgacggaagaaaattcctatcgagacgaccgcgtcggaggatggccctttagtaccaagacccaggggtatccagtctccgactgtactgccgtggctctcaaggccatcatcatggtccagaatacgcctggatacgaggatctgaagaaacaagtgtctgacaagcggaaacacactgccatcgatctacttttgggaatgcagaacgtgggctcgtttgaaccgggctctttcgcctcctatgagcctatccgggcgtcgtccatgctggagaagatcaatccggccgaggtgtttggaaacatcatggtggagtatccgtacgtggaatgcactgattctgttgctctgggtctgtccaactttcgaaagtaccacgattaccgcaacgaagacgtggaccgagccatctctgctgccattggatacattattcgagagcagcagcctgacggcggcttctttggctcctggggcgtgtgctactgctacgctcacatgtttgccatggaggctctggagacgcagaatctcaactataacaactgttccacggttcaaaaggcgtgcgactttctggcgggctaccaggaagcagatggaggctgggccgaggactttaagtcgtgcgagactcagatgtacgtgcgcggaccccattcgctggtcgtgcctactgccatggccctgttgagtttgatgagtggtcggtatccccaggaggacaagattcatgctgcggcccggtttctcatgagcaagcagatgagcaacggtgagtggctcaaggaggagatggagggggtgtttaaccatacttgtgccattgagtatcccaactaccggttttattttgtcatgaaggctttggggttgtatttcaagggatattgccagtga

SEQ ID NO: 109 - DNA, 2229 bp, Artificial sequence
  Synthetic
atgggaatccacgaaagtgtgtcgaaacagtttgcgaaaaacggacattccaagtaccgcagcgaccgatacggcttacctaagacggatctgcgacgatggacgttccacgcgtccgatctgggggcgcaatggtggaagtatgacgataccacaccgctggaagagctggaaaagagggctaccgactacgtcaaatactcgctggagctgccgggatacgcgcccgtgactctggactccaagcccgtgaaaaatgcctacgaagcggctctcaaaaactggcatctgtttgcgtcgctgcaagaccccgactccgacgcatggcagtcggaatacgacggaccgcagttcatgtcgatcggttatgtgacggcgtgctactttggcggcaacgagatccccacgccggtcaaaaccgaaatgatcagatacattgtcaacacagcccacccagttgacggaggctggggccttcacaaagaagacaagagcacctgtttcggtaccagcatcaactacgtggtcctgcgactactgggcctgtcacgggatcatccggtctgcgtcaaggcgcgcaaaacgctgctcaccaagtttggcggcgccatcaacaacccccattggggcaagacctggctgtcgattctcaatctctacaaatgggagggtgtgaatccggcccctggcgagctctggctgttgccctactttgttcctgttcatccgggccgatggtgggtccatacccggtggatctaccttgccatgggctatctggaggctgcggaggcccaatgcgaactcactccgttgctggaggagctccgagacgaaatctacaaaaagccctactcggagattgatttctccaaacattgcaactccatctccggagtcgacctctactatccccacaccggccttttgaagtttggcaacgcgcttctccgacgataccgcaagttcagaccgcagtggatcaaagaaaaggtcaaggaggaaatttacaacttgtgccttcgagaggtttccaacacacgacacttgtgtctcgctcccgtcaacaatgccatgacctccattgtcatgtatctccatgaggggcccgattcggcgaattacaaaaagattgcggcccgatggcccgaatttctgtctctgaatccgtcgggaatgtttatgaacggcaccaacggtctgcaggtctgggatactgcgtttgccgtgcaatacgcgtgtgtttgtggctttgccgaacttccccagtaccagaagacgatccgagcggcgtttgattttctcgatcggtcccagatcaacgagccgacggaggaaaattcctatcgagacgaccgcgtcggaggatggccctttagtaccaagacccaggggtatccagtctccgactgtactgccgaggctctcaaggccatcatcatggtccagaatacgcctggatacgaggatctgaagaaacaagtgtctgacaagcggaaacacactgccatcgatctacttttgggaatgcagaacgtgggctcgtttgaaccgggctctttcgcctcctatgagcctatccgggcgtcgtccatgctggagaagatcaatccggccgaggtgtttggaaacatcatggtggagtatccgtacgtggaatgcactgattctgttgttctgggtctgtcctactttcgaaagtaccacgattaccgcaacgaagacgtggaccgagccatctctgctgccattggatacattattcgagagcagcagcctgacggcggcttctttggctcctggggcgtgtgctactgctacgctcacatgtttgccatggaggctctggagacgcagaatctcaactataacaactgttccacggttcaagaggcgtgcgactttctggcgggctaccaggaagcagatggaggctgggccgaggactttaagtcgtgcgagactcagatgtacgtgcgcggaccccattcgctggtcgtgcctactgccatggccctgttgagtttgatgagtggtcggtatccccaggaggacaagattcatgctgcggcccggtttctcatgagcaagcagatgagcaacggtgagtggctcaaggaggagatggagggggtgtttaaccatacttgtgccattgagtatcccaactaccggttttattttgtcatgaaggctttggggttgtatttcaagggatattgccagtga

SEQ ID NO: 110 - skipped

SEQ ID NO: 111 - DNA, 2226 bp, Artificial sequence
  Synthetic
atgggaatccacgaaagtgtgtcgaaacagtttgcgaaaaacggacattccaagtaccgcagcgaccgatacggcttacctaagacggatctgcgacgatggacgttccacgcgtccgatctgggggcgcaatggtggaagtatgacgataccacaccgctggaagagctggaaaagagggctaccgactacgtcaaatactcgctggagctgccgggatacgcgcccgtgactctggactccaagcccgtgaataatgcctacgaagcggctctcaaaaactggcatctgtttgcgtcgctgcaagaccccgactccggcgcatggcagtcggaatacgacggaccgcagttcatgtcgatcggttatgtgacggcatgctactttggcggcaacgagatccccacgccggtcaaaaccgaaatgatcagatacattgtcaacacagcccacccagttgacggaggctggagccttcacaaagaagacaagagcacctgtttcggtaccagcatcaactacgtggtcctgcgactactgggcctgtcacgggatcatccggtctgcgtcaaggcgcgcaaaacgctgctcaccaagtttggcggcgccatcaacaacccccattggggcaagacctggctgtcgattctcaatctctacaaatgggagggtgtgaatccggcccctggcgagctctggctgttgccctactttgttcctgttcatccgggccgatggtgggtccatacccggtggatctaccttgccatgggctatctggaggctgcggaggcccaatgcgaactcactccgttgctggaggagctccgagacgaaatctacaaaaagccctactcggagattgatttctccaaacattgcaactccatctccggagtcgacctctactatccccacaccggccttttgaagtttggcaacgcgcttctccgacgataccgcaagttcagaccgcagtggatcaaagaaaaggtcaaggaggaaatttacaacttgtgccttcgagaggtttccaacacacgacacttgtgtctcgctcccgtcaacaatgccatgacctccattgtcatgtatctccatgaggggcccgattcggcgaattacaaaaagattgcggcccgatggcccgaatttctgtctctgaatccgtcgggaatgtttatgaacggcaccaacggtctgcaggtctgggatactgcgtttgccgtgcaatacgcgtgtgtttgtggctttgccgaacttccccagtaccagaagacgatccgagcggcgtttgattttctcgatcggtcccagatcaacgagccgacggaggaaaattcctatcgagacgaccgcgtcggaggatggccctttagtaccaagacccaggggtatccagtctccgactgtactgccgaggctctcaaggccatcatcatggtccagaatacgcctggatacgaggatctgaagaaacaagtgtctgacaagcggaaacacactgccatcgatctacttttgggaatgcagaacgtgggcttgtttgaaccgggctctttcgcctcctatgagactatccgggcgtcgtccatgctggagaagatcaatccggccgaggtgtttggaaacatcatggtggagtatccgtacgtggaatgcactgattctgttgttctgggtctgtcctactttcgaaagtaccacgattaccgcaacgaagacgtggaccgagccatctctgctgccattggatacattattcgagagcagcagcctgacggcggcttctttggctcctggggcgtgtgctactgctacgctcacatgtttgccatggaggctctggagacgctgaatctcaactataacaactgttccacggttcaaaaggcgtgcgactttctggcgggctaccaggaagcagatggaggctgggccgaggactttaagtcgtgcgagactcagatgtacgtgcgcggaccccattcgctggtcgtgcctactgccatggccctgttgagtttgatgagtggtcggtatccccaggaggacaagattcatgctgcggcccggtttctcatgagcaagcagatgagcaacggtgagtggctcaaggaggagatggagggggtgtttaaccatacttgtgccattgagtatcccaactaccggttttattttgtcatgaaggctttggggttgtatttcaagggatattgctag

SEQ ID NO: 112 - DNA, 2229 bp, Artificial sequence
  Synthetic
atgggaatccacgaaagtgtgtcgaaacagtttgcgaaaaacggacattccaagtaccgcagcgaccgatacggcttacctaagacggatctgcgacgatggacgttccacgcgtccgatctgggggcgcaatggtggaagtatgacgataccacaccgctggaagagctggaaaagagggctaccgactacgtcaaatactcgctggagctgccgggatacgcgcccgtgactctggactccaagcccgtgaaaaatgcctacgaagcggctctcaaaaactggcatctgtttgcgtcgctgcaagaccccgactccggcgcatggcagtcggaatacgacggaccgcagttcatgtcgatcggttatgtgacggcatgctactttggcggcaacgagatccccacgccggtcaaaactgaaatgatcagatacattgtcaacacagcccacccagttgacggaggctggggccttcacaaagaagacaagagcacctgtttcggtaccagcatcaactacgtggtcctgcgactactgggcctgtcacgggatcatccggtctgcgtcaaggcgcgcaaaacgctgctcaccaagtttggcggcgccatcaacaacccccattggggcaagatcttgctgtcgattctcaatctctacaaatgggagggtgtgaatccggcccctggcgagctctggctgttgccctactttgttcctgttcatccgggccgatggtgggtccatacccggtggatctaccttgccatgggctatctggaggctgcggaggcccaatgcgaactcactccgttgctggaggagctccgagacgaaatctacaaaaagccctactcggagattgatttctccaaacattgcaactccatctccggagtcgacctctactatccccacaccggccttttgaagtttggcaacgcgcttctccgacgataccgcaagttcagaccgcagtggatcaaagaaaaggtcaaggaggaaatttacaacttgtgccttcgagaggtttccaacacacgacacttgtgtctcgctcccgtcaacaatgccatgacctccattgtcatgtatctccatgaggggcccgattcggcgaattacaaaaagattgcggcccgatggcccgaatttctgtctctgaatccgtcgggaatgtttatgaacggcaccaacggtctgcaggtctgggatactgcgtttgccgtgcaatacgcgtgtgtttgtggctttgccgaacttccccagtaccagaagacgatccgagcggcgtttgattttctcgatcggtcccagatcaacgagccgacggaggaaaattcctatcgagacgaccgcgtcggaggatggccctttagtaccaagacccaggggtatccagtctccgactgtactgccgaggctctcaaggccatcatcatggtccagaatacgcctggatacgaggatctgaagaaacaagtgtctgacaagcggaaacacactgccatcgatctacttttgggaatgcagaacgtgggctcgtttgaaccgggctctttcgcctcctatgagcctatccgggcgtcgtccatgctggagaagatcaatccggccgaggtgtttggatacatcatggtggagtatccgtacgaggaatgcactgattctgttgttctgggtctgtcctactttcgaaagtaccacgattaccgcaacgaagacgtggaccgagccatctctgctgccattggatacattattcgagagcagcagcctgacggcggcttctttggctcctggggcgtgtgctactgctacgctcacatgtttgccatggaggctctggagacgcagaatctcaactataacaactgttccacagttcaaaaggcgtgcgactttctggcgggctaccaggaagcagatggaggctgggccgaggactttaagtcgtgcgagactcagatgtacgtgcgcggaccccattcgctggtcgtgcctactgccatggccctgttgagtttgatgagtggtcggtatccccaggaggacaagattcatgctgcggcccggtttctcatgagcaagcagatgagcaacggtgagtggctcaaggaggagatggagggggtgtttaaccatacttgtgccattgagtatcccaactaccggttttattttgtcatgaaggctttggggttgtatttcaagggatattgccagtga

SEQ ID NO: 113 - DNA, 2229 bp, Artificial sequence
  Synthetic
atgggaatccacgaaagtgtgtcgaaacagtttgcgaaaaacggacattccaagtaccgcagcgaccgatacggcttacctaagacggatctgcgacgatggacgttccacgcgtccgatctgggggcgcaatggtggaagtatgacgataccacaccgctggaagagctggaaaagagggctaccgactacgtcaaatactcgctggagctgccgggatacgcgcccgtgactctggactccaagcccgtgaaaaatgcctacgaagcggctctcaaaaactggcatctgtttgcgtcgctgcaagaccccgactccggcgcatggcagtcggaatacgacggaccgcagttcatgtcgatcggttatgtgacggcgtgctactttggcggcaacgagatccccacgccggtcaaaaccgaaatgatcagatacattgtcaacacagcccacccagttgacggaggctggggccttcacaaagaagacaagagcacctgtttcggtaccagcatcaactacgtggtcctgcgactactgggcctgtcacgggatcatccggtctgcgtcaaggcgcgcaaaacgctgctcaccaagtttggcggcgccatcaacaacccccattggggcaagacctggctgtcgattctcaatctctacaaatgggagggtgtgaatccggcccctggcgtgctctggctgttgccctactttgttcctgttcatccgggccgatggtgggtccatacccggtggatctaccttgccatgggctatctggaggctgcggaggcccaatgcgaactcactccgttgctggaggagctccgagacgaaatctacaaaaagccctactcggagattgatttctccaaacattgcaactccatctccggagtcgacctctactatccccacaccggccttttgaagtttggcaacgcgcttctccgacgataccgcaagttcagaccgcagtggatcaaagaaaaggtcaaggaggaaatttacaacttgtgccttcgagaggtttccaacacacgacacttgtgtctcgctcccgtcaacaatgccatgacctccattgtcatgtatctccatgaggggcccgattcggcgaattacaaaaagattgcggcccgatggcccgaatttctgtctctgaatccgtcgggaatgtttatgaacggcaccaacggtctgcaggtctgggatactgtgtttgccgtgcaatacgcgtgtgtttgtggctttgccgaacttcccctgtaccagaagacgatccgagcggcgtttgattttctcgatcggtcccagatcaacgagccgacggaggaaaattcctatcgagacgaccgcgtcggaggatggccctttagtaccaagacccaggggtatccagtctccgactgtactgccgaggctctcaaggccatcatcatggtccagaatacgcctggatacgaggatctgaagaaacaagtgtctgacaagcggaaacacactgccatcgatctacttttgggaatgcagaacgtgggctcgtttgaaccgggctctttcgcctcctatgagcctatccggacgtcgtccatgctggagaagatcaatccggccgaggtgtttggaaacatcatggtggagtatccgtacgtggaatgcactgattctgttgttctgggtctgtcctgctttcgaaagtaccacgattaccgcaacgaagacgtggaccgagccatctctgctgccattggatacattattcgagagcagcagcctgacggcggcttctttggctcctggggcgtgtgctactgctacgctcacatgtttgccatggaggctctggagacgcagaatctcaactataacaactgttccacggttcaaaaggcgtgcgactttctggcgggctaccaggaagcagatggaggctgggccgaggactttaagtcgtgcgagactcagatgtacgtgcgcggaccccattcgctggtcgtgcctactgccatggccctgttgagtttgatgagtggtcggtatccccaggaggacaagattcatgctgcggcccggtttctcatgagcaagcagatgagcaacggtgagtggctcaaggaggagatggagggggtgtttaaccatacttgtgccattgagtatcccaactaccggttttattttgtcatgaaggctttggggttgtatttcaagggatattgccagtga

SEQ ID NO: 114 - DNA, 2229 bp, Artificial sequence
  Synthetic
atgggaatccacgaaagtgtgtcgaaacagtttgcgaaaaacggacattccaagtaccgcagcgaccgatacggcttacctaagacggatctgcgacgatggacgttccacgcgtccgatctgggggcgcaatggtggaagtatgacgataccacaccgctggaagagctggaaaagagggctaccgactacgtcaaatactcgctggagctgccgggatacgcgcccgtgactctggactccaagcccgtgaaaaatgcctacgaagcggctctcaaaaactggcatctgtttgcgtcgctgcaagaccccgactcaggcgcatggcagtcggaatacgacggaccgcagttcatgtcgatcggttatgtgacggcgtgctactttggcggcaacgagatccccacgccggtcaaaaccgaaatgatcagatacattgtcaacacagcccacccagttgacggaggctggggccttcacaaagaagacaagagcacctgtttcggtaccagcatcaactacgtggtcctgcgactactgggcctgtcacgggatcatccggtctgcgtcaaggcgcgcaaaacgctgctcaccaagtttggcggcgccatcaacaacccccattggggcaagacctggctgtcgattctcaatctctacaaatgggagggtgtgaatccggcccctggcgagctctggctgttgccctactttgttcctgttcatccgggccgatggtgggtccatacccggtggatctaccttgccatgggctatctggaggctgcggaggcccaatgcgaactcactccgttgctggaggagctccgagacgaaatctacaaaaagccctactcggggattgatttctccaaacattgcaactccatctccggagtcgacctctactatccccacaccggccttttgaagtttggcaacgcgcttctccgacgataccgcaagttcagaccgcagtggatcaatgaaaaggtcaaggaggaaatttacaacttgtgccttcgagaggtttccaacacacgacacttgtgtctcgctcccgtcaacaatgccatgacctccattgtcatgtatctccatgaggggcccgattcggcgaattacaaaaagattgcggcccgatggcccgaatttctgtctctgaatccgtcgggaatgtttatgaacggcaccaacggtctgcaggtctgggatactgcgtttgccgtgcaatacgcgtgtgtttgtggctttgccgaacttccccagtaccagaagacgatccgagcggcgtttgattttctcgatcggtcccagatcaacgagccgacggaggaaaattcctatcgagacgaccgcgtcggaggatggccctttagtaccaagacccaggggtatccagtctccgactgtactgccgaggctctcaaggccatcatcatggtccagaatacgcctggatacgaggatctgaagaaacaagtgtctgacaagcggaaacacactgccatcgatctacttttgggaatgcagaacgtgggctcgtttgaaccgggctctttcgcctcctatgagcctatccgggcgtcgtccatgctggagaagatcaatccggccgaggtgtttggaaacatcatggtggagtatccgtacgtggaatgcactgattctgttgttctgggtctgtcctactttcgaaagtaccacgattaccgcaacgaagacgtggaccgagccatctctgctgccattggatacattattcgagagcagcagcctgacggcggcttctttggctcctggggcgtgtgctactgctacgctcacatgtttgccatggaggctctggtgacgcagaatctcaactataacaactgttccacggttcaaaaggcgtgcgactttctggcgggctaccaggaagcagatggaggctgggccgaggactttaagtcgtgcgagactcagatgtacgtgcgcggaccccattcgctggtcgtgcctactgccatggccctgttgagtttgatgagtggtcggtatccccaggaggacaagattcatgctgcggcccggtttctcatgagcaagcagatgagcaacggtgagtggctcaaggaggagatggagggggtgtttaaccatacttgtgccattgagtatcccaactaccgggtttattttgtcatgaaggctttggggttgtatttcaagggatattgccagtga

SEQ ID NO: 115 - DNA, 2229 bp, Artificial sequence
  Synthetic
atgggaatccacgaaagtgtgtcgaaacagtttgcgaaaaacggacattccaagtaccgcagcgaccgatacggcttacctaagacggatctgcgacgatggacgttccacgcgtccgatctgggggcgcaatggtgggagtatgacgataccacaccgctggaagagctggaaaagagggctaccgactacgtcaaatactcgctggagctgccgggatacgcgcccgtgactctggactccaagcccgtgaaaaatgcctacgaagcggctatcaaaaactggcatctgtttgcgtcgctgcaagaccccgactccggcgcatggcagtcggaatacgacggaccgcagttcatgtcgatcggttatgtgacggcgtgctactttggcggcaacgagatccccacgccggtcaaaaccgaaatgatcagatacattgtcaacacagcccacccagttgacggaggctggggccttcacaaagaagacaagagcacctgtttcggtaccagcatcaactacgtggtcctgcgactactgggcctgtcacgggatcatccggtctgcgtcaaggcgcgcaaaacgctgctcaccaagtttggcggcgccatcaacaacccccattggggcaagacctggctgtcgattctcaatctctacaaatgggagggtgtgaatccggcccctggcgagctctggctgttgccctactttgttcctgttcatccgggtcgatggtgggtccatacccggtggatctaccttgccatgggctatctggaggctgcggaggcccaatgcgaactcactccgttgctggaggagctccgagacgaaatctacaaaaagccctactcggagattgatttctccaaacattgcaactccatctccggagtcgacctctactatccccacaccggccttttgaagtttggcaacgcgcttctccgacgataccgcaagttcagaccgcagtggatcaaagaaaaggtcaaggaggaaatttacaacttgtgccttcgagaggtttccaacacacgacacttgtgtctcgctcccgtcaacaatgccatgtcctccattgtcatgtatctccatgaggggcccgatccggcgaattacaaaaagattgcggcccgatggcccgaatttctgtctctgaatccgtcgggaatgtttatgaacggcaccaacggtctgcaggtctgggatactgcgtttgccgtgcaatacgcgtgtgtttgtggctttgccgaacttccccagtaccagaagacgatccgagcggcgtttgattttctcgatcggtcccagatcaacgagccgatggaggaaaattcctatcgagacgaccgcgtcggaggatggccctttagtaccaagacccaggggtatccagtctccgactgtactgccgaggctctcaaggccatcatcatggtccagaatacacctggatacgaggatctgaagaaacaagtgtctgacaagcggaaacacactgccatcgatctacttttgggaatgcagaacgtgggctcgtttgaaccgggctctttcgcctcctatgagcctatccgggcgtcgtccatgctggagaagatcaatccggccgaggtgtttggaaacatcatggtggagtatccgtacgtggaatgcactgattctgttgttctgggtctgtcctactttcgaaagtaccacgattaccgcaacgaagacgtggacccagccatctctgctgccattggatacattattcgagagcagcagcctgacggcggcttctttggctcctggggcgtgtgctactgctacgctcacatgtttgccatggaggctctggagacgcagaatctcaactataacaactgttccacggttcaaaaggcgtgcgactttctggcgggctaccaggaagcagatggaggctgggccgaggactttaagtcgtgcgagactcagatgtacgtgcgcggaccccattcgctggtcgtgcctactgccatggccctgttgagtttgatgagtggtcggtatccccaggaggacaagattcatgctgcggcccggtttctcatgagcaagcagatgagcaacggtgagtggctcaaggaggagatggagggggtgtttaaccatacttgtgccattgagtatcccaactaccggttttattttgtcatgaaggctttggggttgtatttcaagggatattgccagtga

SEQ ID NO: 116 - DNA, 2229 bp, Artificial sequence
  Synthetic
atgggaatccacgaaagtgtgtcgaaacagtttgcgaaaaacggacattccaagtaccgcagcgaccgatacggcttacctaagacggatctgcgacgatggacgttccacgcgtccgatctgggggcgcaatggtggaagtatgacgataccacaccgctggaagagctggaaaagagggctaccgactacgtcaaatactcgctggagctgccgggatacgcgcccgtgactctggactccaagcccgtgaaaaatgcctacgaagcggctctcaaaaactggcatctgtttgcgtcgctgcaagaccccgactccggcgcatggcagtcggaatacgacggaccgcagttcatgtcgatcggttatgtgacggcgtgctactttggcggcaacgagatccccacgccggtcaaaaccgaaatgatcagatacattgtcaacacagcccacccagttgacggaggctggggccttcacaaagaagacaagagcacctgtttcggtaccagcatcaactacgtggtcctgcgactactgggcctgtcacgggatcatccggtctgcgtcaaggcgcgcaaaacgctgctcaccaagtttggcggcgccatcaacaacccccattggggcaagacctggctgtcgattctcaatctctacaaatgggagggtgtgaatccggcccctggcgagctctggctgttgccctactttgttcctgttcatccgggccgatggtgggtccatacccggtggatctaccttgccatgggctatctggaggctgcggaggcccaatgcgaactcactccgttgctggaggagctccgagacgaaatctacaaaaagccctactcggagattgatttctccaaacattgcaactccatctccggagtcgacctctactatccccacaccggccttttgaagtttggcaacgcgcttctccgacgataccgcaagttcagaccgcagtggatcaaagaaaaggtcaaggaggaaatttacaacttgtgccttcgagaggtttccaacacacgacacttgtgtctcgctcccgtcaacaatgccatgacctccattgtcatgtatctccatgaggggcccgattcggcgaattacaaaaagattgcggcccgatggcccgaatttctgtctctgaatccgtcgggaatgtttatgaacggcaccaacggtctgcaggtctgggatactgcgtttgccgtgcaatacgcgtgtgtttgtggctttgccgaacttccccagtaccagaagacgatccgagcggcgtctgattttctcgatcggtcccagatcaacgagccgacggaggaaaattcctatcgagacggccgcgtcggaggatggccctttagtaccaagacccaggggtatccagtctccgactgtactgccgaggctctcaaggccatcatcatggtccagaatacgcctggatacgaggatctgaagaaacaagtgtctgacaagcggaaacacactgccatcgatctacttttgggaatgcagaacgtgggctcgtttgaaccgggctctttcgcctcctatgagcctatccgggcgtcgtccatgctggagaagttcaatccggccgaggtgtttggaaacatcatggtggagtatccgtacgtggaatgcactgattctgttgttctgggtctgtcctactttcgaaagtaccacgattaccgcaacgaagacgtggaccgagccatctctgctgccattggatacattattcgagagcagcagcctgacggtggcttctttggctcctggggcgtgtgctactgctacgctcacatgtttgccatggaggctctggagacgcagaatctcaactataacaactgttccacggttcaaaaggcgtgcgactttctggcgggctaccaggaagcagatggaggctgggccgaggactttaagtcgtgcgagactcagatgtacgtgcgcggaccccattcgctggtcgtgcctactgccatggccctgttgagtttgatgagtggtcggtatccccaggaggacaagattcatgctgcggcccggtttctcatgagcaagcagatgagcaacggtgagtggctcaaggaggagatggagggggtgtttaaccatacttgtgccattgagtatcccaactaccggttttattttgtcatgaaggctttggggttgtatttcaagggatattgccagtga

SEQ ID NO: 117 - DNA, 2229 bp, Artificial sequence
  Synthetic
atgggaatccacgaaagtgtgtcgaaacagtttgcgaaaaacggacattccaagtaccgcagcgaccgatacggcttacctaagacggatctgcgacgatggacgttccacgcgtccgatctgggggcgcaatggtggaagtatgacgataccacaccgctggaagagctggaaaagagggctaccgactacgtcaaatactcgctggagctgccgggatacgcgcccgtgactctggactccaagcccgtgaaaaatgcctacgaagcggctctcaaaaactggcatctgtttgcgtcgctgcaagaccccgactccggcgcatggcagtcggaatacgacggaccgcagttcatgtcgatcggttatgtgacggcgtgctactttggcggcaacgagatccccacgccggtcaaaaccgaaatgatcagatacattgtcaacacagcccacccagttgacggaggctggggccttcacaaagaagacaagagcacctgtttcggtaccagcatcaactacgtggtcctgcgactactgggcctgtcacgggatcatccggtctgcgtcaaggcgcgcaaaacgctggtcaccaagtttggcggcgccatcaacaacccccattggggcaagacctggctgtcgattctcaatctctacaaatgggagggtgtgaatccggcccctggcgagctctggctgttgccctactttgttcctgttcatccgggccgatggtgggtccatacccggtggatctaccttgccatgggctatctggaggctgcggaggcccaatgcgaactcactccgttgctggaggagctccgagacgaaatctacataaagccctactcggagattgatttctccaaacattgcaactccatctccggagtcgacctctactatccccacaccggccttttgaagtttggcagcgcgcttctccgacgataccgcaagttcagaccgcagtggatcaaagaaaaggtcaaggaggaaatttacaacttgtgccttcgagaggtttccaacacacgacacttgtgtctcgctcccgtcaacaatgccatgacctccattgtcatgtatctccatgaggggctcgattcggcgaattacaaaaagattgcggcccgatggcccgaatttctgtctctgaatccgtcgggaatgtttatgaacggcaccaacggtctgcaggtctgggatactgcgtttgccgtgcaatacgcgtgtgtttgtggctttgccgaacttccccagtaccagaagacgatccgagcggcgtttgattttctcgatcggtcccagatcaacgagccgacggaggaaaattcctatcgagacgaccgcgtcggaggatggccctttagtaccaagacccaggggtatccagtctccgactgtactgccgaggctctcaaggccatcatcatggtccagaatacgcctggatacgaggatctgaagaaacaagtgtctgacaagcggaaacacactgccatcgatctacttttgggaatgcagaacgtgggctcgtttgaaccgggctctttcgcctcctatgagcctatccgggcgtcgtccatgctggagaagatcaatccggccgaggtgtttggaaacatcatggtggagtatccgtacgtggaatgcactgattctgttgttctgggtctgtcctactttcgaaagtaccacgattaccgcaacgaagacgtggaccgagccatctctgctgccattggatatattattcgagagcagcagcctgacggcggcttctttggctcctggggcgtgtgctactgctacactcacatgtttgccatggaggctctggagacgcagaatctcaactataacaactgttccacggttcaaaaggcgtgcgactttctggcggactaccaggaagcagatggaggctgggccgaggaccttaagtcgtgcgagactcagatgtacgtgcgcggaccccattcgctggtcgtgcctactgccatggccctgttgagtttgatgagtggtcggtatccccaggaggacaagattcatgctgcggcccggtttctcatgagcaagcagatgagcaacggtgagtggctcaaggaggagatggagggggtgtttaaccatacttgtgccattgagtatcccaactaccggttttattttgtcatgaaggctttggggttgtatttcaagggatattgccagtga

SEQ ID NO: 118 - protein, 742 aa, Artificial sequence
  Synthetic
MGIHESVSKQFAKNGHSKYRSDRYGLPKTDLRRWTFHASDLGAQWWKYDDTTPLEELEKRATDYVKYSLELPGYAPVTLDSKPVKNAYEAALKNWHLFASLQDPDSGAWQSEYDGPQFMSIGYVTACYFGGNEIPTPVKTEMIRYIVNTAHPVDGGWGLHKEDKSTCFGTSINYVVLRLLGLSRDHPVCVKARKTLLTKFGGAINNPHWGKTWLSILNLYKWEGVNPAPGELWLLPYFVPVHPGRWWFHTRWIYLAMGYLEAAEAQCELTPLLEELRDEIYKKPYSEIDFSKHCNSISGVDLYYPHTGLLKFGNALLRRYRKFRPQWIKEKVKEEIYNLCLREVSNTRHLCLAPVNNAMTSIVMYLHEGPVSANYKKIAARWPEFLSLNPSGMFMNGTNGLQVWDTAFAVQYACVCGFAELPQYQKTIRAAFDFLDRSQINEPTEENSYRDDRVGGWPFSTKTQGYPVSDCTAEALKAIIMVQNTPGYEDLKKQVSDKRKHTAIDLLLGMQNVGSFEPGSFASYEPIRASSMLEKINPAEVFGNIMVEYPYVECTDSVVLGLSYFRKYHDYRNEDVDRAISAAIGYIIREQQPDGGFFGSWGVCYCYAHMFAMEALETQNLNYNNCSTVQKACDFLAGYQEADGGWAEDFKSCETQMYVRGPHSLVVPTAMALLSLMSGRYPQEDKIHAAARFLMSKQMSNDEWLKEEMEGVFNHTCAIEYPNYRFYFVMKALGLYFKGYCQ

SEQ ID NO: 119 - protein, 742 aa, Artificial sequence
  Synthetic
MGIHESVSKQFAKNGHSKYRSDRYGLPKTDLRRWTFHASDLGAQWWKYDDTTPLEELEKRATDYVKYSLELPGYAPVTLDSKPVKNAYEAALKNWHLFASLQDPDSGAWQSEYDGPQFMSIGYVTACYFGGNEIPTPVKTEMIRYIVNTAHPVDGGWGLHKEDKSTCFGTSINYVVLRLLGLSWDHPVCVKARKTLLTKFGGAINNPHWGKTWLSILNLYKWEGVNPAPGELWLMPYFVPVHPGRWWVHTRWIYLAMGYREAAEAQCELTPLLEELRDEIYKKPYSEIDFSKHCNSISGVDLYYPHTGLLKFGNALLRRYRKFRPQWIKEKVKEEIYNLCLREVSNTRHLCLAPVNNAMTSIVMYLHEGPDSANYKKIAARWPEFLSLNPSGMFMNGTNGLQVWDTAFAVQYACVCGFAELPQYQKTIRAAFDFLDRSQINEPTEENSYRDDRVGGWPFSTKTQGYPVSDCTAEALKAIIMVQNTPGYEDLKKQVSDKRKHTAIDLLLGMQNVGSFEPGSFASYEPIRASSMLEKINPAEVFGNIMVEYPYVECTDSVVLGLSYFRKYHDYRNEDVDRAISAAIGYIIREQQPDGGFFGSWGVCYCYAHMFAMEALETQNLNYNNCSTVQKACDFLAGYQEADGGWAEDFKSCETQMYVRGPHSLVVPTAMALLSLMSGRYPQEDKIHAAARFLMSKQMSNGEWLKEEMQGVFNHTCAIEYPNYRFYFVMKALGLYFKGYCQ

SEQ ID NO: 120 - protein, 742 aa, Artificial sequence
  Synthetic
MGIHESVSKQFAKNGHSKYRSDRYGLPKTDLRRWTFHASDLGAQWWKYDDTTPLEELEKRATDYVKYSLELPGYAPVTLDSKPVKNAYEAALKNWHLFASLQDPDSGAWQSEYDGPQFMSIGYVTACYFGGNEIPTPVKTEMIRYIVNTAHPVDGGWGLHKEDKSTCFGTSINYVVLRLLGLSRDHPVCVKARKTLLTKFGGAINNPHWGKTWLSILNLYKWEGVNPAPGELWLLPYFVPVHPGRWWVHTRWIYLAMGYLEAAEAQCELTPLLEELRDEIYKKPYSEIDFSKHCNSISGVDLYYPHTGLLKFGNALLRRYRKFRPQWIKEKVKEEIYNLCLREVSNTRHLCLAPVNNAMTSIVMYLHEGPDSANYKKIAARWPEFLSLNPSGMFMNGTNGLQVWDTAFAVQYACVCGFAELPQYQKTIRAAFDFLDRSQINEPTEENSYRDDRVGGWPFSTKTQGYPVSDCTAEALKAIIMVQNTPGYEDQKKQVSDKRKHTAIDLLLGMQNVGSFEPGSFASYEPIRASSMLEKINPAEVFGNIMVEYPYVECTDSVVLGLSYFRKYHDYRNEDVDRAISAAIGFIIREQQPDGGFFGSWGVCYCYAHMFAMEALETQNLNYNNCSTVQKACDFLAGYQEADGGWAEDFKSCETQMYVHGPHSLVVPTAMALLSLMSGRYPQEDKIHAAARFLMSKQMSNGEWLKEEMEGVFNHTCAIEYPNYRFYFVMKALGLYFKGYCQ

SEQ ID NO: 121 - protein, 453 aa, Unknown
  Siraitia grosvenorii
MDAQRGHTTTILMFPWLGYGHLSAFLELAKSLSRRNFHIYFCSTSVNLDAIKPKLPSSSSSDSIQLVELCLPSSPDQLPPHLHTTNALPPHLMPTLHQAFSMAAQHFAAILHTLAPHLLIYDSFQPWAPQLASSLNIPAINFNTTGASVLTRMLHATHYPSSKFPISEFVLHDYWKAMYSAAGGAVTKKDHKIGETLANCLHASCSVILINSFRELEEKYMDYLSVLLNKKVVPVGPLVYEPNQDGEDEGYSSIKNWLDKKEPSSTVFVSFGSEYFPSKEEMEEIAHGLEASEVHFIWVVRFPQGDNTSAIEDALPKGFLERVGERGMVVKGWAPQAKILKHWSTGGFVSHCGWNSVMESMMFGVPIIGVPMHLDQPFNAGLAEEAGVGVEAKRDPDGKIQRDEVAKLIKEVVVEKTREDVRKKAREMSEILRSKGEEKMDEMVAAISLFLKI

SEQ ID NO: 122 - protein, 9 aa, Artificial sequence
  Synthetic
MDAQRGHTT

SEQ ID NO: 123 - protein, 5 aa, Artificial sequence
  Synthetic
TILMF

SEQ ID NO: 124 - protein, 4 aa, Artificial sequence
  Synthetic
PWLG

SEQ ID NO: 125 - protein, 16 aa, Artificial sequence
  Synthetic
YGHLSAFLELAKSLSR

SEQ ID NO: 126 - protein, 3 aa, Artificial sequence
  Synthetic
RNF

SEQ ID NO: 127 - protein, 4 aa, Artificial sequence
  Synthetic
HIYF

SEQ ID NO: 128 - protein, 3 aa, Artificial sequence
  Synthetic
CST

SEQ ID NO: 129 - protein, 6 aa, Artificial sequence
  Synthetic
SVNLDA

SEQ ID NO: 130 - protein, 11 aa, Artificial sequence
  Synthetic
IKPKLPSSSSS

SEQ ID NO: 131 - protein, 4 aa, Artificial sequence
  Synthetic
DSIQ

SEQ ID NO: 132 - protein, 23 aa, Artificial sequence
  Synthetic
LVELCLPSSPDQLPPHLHTTNAL

SEQ ID NO: 133 - protein, 21 aa, Artificial sequence
  Synthetic
PPHLMPTLHQAFSMAAQHFAA

SEQ ID NO: 134 - protein, 8 aa, Artificial sequence
  Synthetic
ILHTLAPH

SEQ ID NO: 135 - protein, 5 aa, Artificial sequence
  Synthetic
LLIYD

SEQ ID NO: 136 - protein, 4 aa, Artificial sequence
  Synthetic
SFQP

SEQ ID NO: 137 - protein, 9 aa, Artificial sequence
  Synthetic
WAPQLASSL

SEQ ID NO: 138 - protein, 3 aa, Artificial sequence
  Synthetic
NIP

SEQ ID NO: 139 - protein, 5 aa, Artificial sequence
  Synthetic
AINFN

SEQ ID NO: 140 - protein, 3 aa, Artificial sequence
  Synthetic
TTG

SEQ ID NO: 141 - protein, 12 aa, Artificial sequence
  Synthetic
ASVLTRMLHATH

SEQ ID NO: 142 - protein, 21 aa, Artificial sequence
  Synthetic
YPSSKFPISEFVLHDYWKAMY

SEQ ID NO: 143 - protein, 4 aa, Artificial sequence
  Synthetic
SAAG

SEQ ID NO: 144 - protein, 6 aa, Artificial sequence
  Synthetic
GAVTKK

SEQ ID NO: 145 - protein, 15 aa, Artificial sequence
  Synthetic
DHKIGETLANCLHAS

SEQ ID NO: 146 - protein, 2 aa, Artificial sequence
  Synthetic
CS

SEQ ID NO: 147 - protein, 4 aa, Artificial sequence
  Synthetic
VILI

SEQ ID NO: 148 - protein, 7 aa, Artificial sequence
  Synthetic
NSFRELE

SEQ ID NO: 149 - protein, 10 aa, Artificial sequence
  Synthetic
EKYMDYLSVL

SEQ ID NO: 150 - protein, 2 aa, Artificial sequence
  Synthetic
LN

SEQ ID NO: 151 - protein, 3 aa, Artificial sequence
  Synthetic
KKV

SEQ ID NO: 152 - protein, 20 aa, Artificial sequence
  Synthetic
VPVGPLVYEPNQDGEDEGYS

SEQ ID NO: 153 - protein, 9 aa, Artificial sequence
  Synthetic
SIKNWLDKK

SEQ ID NO: 154 - protein, 4 aa, Artificial sequence
  Synthetic
EPSS

SEQ ID NO: 155 - protein, 5 aa, Artificial sequence
  Synthetic
TVFVS

SEQ ID NO: 156 - protein, 8 aa, Artificial sequence
  Synthetic
FGSEYFPS

SEQ ID NO: 157 - protein, 14 aa, Artificial sequence
  Synthetic
KEEMEEIAHGLEAS

SEQ ID NO: 158 - protein, 3 aa, Artificial sequence
  Synthetic
EVH

SEQ ID NO: 159 - protein, 5 aa, Artificial sequence
  Synthetic
FIWVV

SEQ ID NO: 160 - protein, 7 aa, Artificial sequence
  Synthetic
RFPQGDN

SEQ ID NO: 161 - protein, 11 aa, Artificial sequence
  Synthetic
TSAIEDALPKG

SEQ ID NO: 162 - protein, 5 aa, Artificial sequence
  Synthetic
FLERV

SEQ ID NO: 163 - protein, 4 aa, Artificial sequence
  Synthetic
GERG

SEQ ID NO: 164 - protein, 4 aa, Artificial sequence
  Synthetic
MVVK

SEQ ID NO: 165 - protein, 4 aa, Artificial sequence
  Synthetic
GWAP

SEQ ID NO: 166 - protein, 6 aa, Artificial sequence
  Synthetic
QAKILK

SEQ ID NO: 167 - protein, 5 aa, Artificial sequence
  Synthetic
HWSTG

SEQ ID NO: 168 - protein, 4 aa, Artificial sequence
  Synthetic
GFVS

SEQ ID NO: 169 - protein, 3 aa, Artificial sequence
  Synthetic
HCG

SEQ ID NO: 170 - protein, 10 aa, Artificial sequence
  Synthetic
WNSVMESMMF

SEQ ID NO: 171 - protein, 3 aa, Artificial sequence
  Synthetic
GVP

SEQ ID NO: 172 - protein, 4 aa, Artificial sequence
  Synthetic
IIGV

SEQ ID NO: 173 - protein, 4 aa, Artificial sequence
  Synthetic
PMHL

SEQ ID NO: 174 - protein, 12 aa, Artificial sequence
  Synthetic
DQPFNAGLAEEA

SEQ ID NO: 175 - protein, 2 aa, Artificial sequence
  Synthetic
GV

SEQ ID NO: 176 - protein, 3 aa, Artificial sequence
  Synthetic
GVE

SEQ ID NO: 177 - protein, 10 aa, Artificial sequence
  Synthetic
AKRDPDGKIQ

SEQ ID NO: 178 - protein, 13 aa, Artificial sequence
  Synthetic
RDEVAKLIKEVVV

SEQ ID NO: 179 - protein, 1 aa, Artificial sequence
  Synthetic
E

SEQ ID NO: 180 - protein, 21 aa, Artificial sequence
  Synthetic
KTREDVRKKAREMSEILRSKG

SEQ ID NO: 181 - protein, 4 aa, Artificial sequence
  Synthetic
EEKM

SEQ ID NO: 182 - protein, 11 aa, Artificial sequence
  Synthetic
DEMVAAISLFL

SEQ ID NO: 183 - protein, 2 aa, Artificial sequence
  Synthetic
KI

SEQ ID NO: 184 - DNA, 2271 bp, Artificial Sequence
  Synthetic
atgtggagattgaagattgcagaaggtggatccccatggttacgtaccacaaataaccatgttggtagacaaatctgggagttcgaccctaacttgggtactccagaacagataagagaagtcgaagaggctagagaaaacttttggaaaaatagattcgaacaaaagcactcttcagatttattgatgcgtatgcaatttgcccaagaaaactcttccaatgttgtcttgccacaagttaaggtcaaagatgaagacgaaattactaaggaagctgttaaatctaccttggaaagagctttatctttctactccgccgtccagacttcagacggtaactgggcttctgatttgggtggtcctatgtttttattgccaggtttggttatcgctttgtccgtcactggtgccttaaacgctgttttgtctaaggagcaccaaaaggaaatgtgcagatatttatacaaccatcaaaataaggatggtggttggggtttgcacattgagggtcactcaaccatgttcggtaccgttttgacatatgtcactttgagattgttgggtgaaggtgttgatgacggtgatggtgctatggaaagaggtagaaaatggacattagaacatggttccgcaactgctatcacctcttggggtaagatgtggttgtctgttttgggagtcttcgaatgggctggtaataatccaatgccaccagaaacctggttattgccatacatcttaccagtccaccctggtcgtatgtggtgtcattgtagaatggtttacttgcctatgtcatacttgtacggtaaaagatttgttggtccaattactccaacagttttatctttaagaagagaattgttcgacgttccatatcacgagatcgattgggaccgtgccagaaacgaatgtgctaaggaagatttatactatcctcacccattggtccaagacattttgtgggcctccttacataaggccgtcgagcctatattgatgagatggccaggtaaaaagttgcgtgaaaaggctttgtctactgtcatggaacacatacactacgaagacgaaaacaccagatatatttgtttgggtccagttaataaggtcttgaacttgttgtgctgttgggttgaagatccttattctgatgctttcaagttacatttgcaacgtgttcatgactacttgtgggttgccgaagacggtatgaagatgcaaggttacaacggttcccaattgtgggacactgctttttctatccaggctattttagcaaccaacttaggtgaggaatatggtggtacattgagaaaagcacacaatttcatcaaggattcacaaattcaagaagattgtccaggtgacccaaacgtttggtttagacatatccataagggtgcttggccattttccactcgtgatcacggttggttaatttcagactgcactgctgaaggtttgaaagcatccttgatgttatctaaattaccatccacaatggtcggtgaaccattggaagttaacagattgtgtgatgctgttaacgtcttgttgtctttacaaaatgataatggtggtttcgcctcatacgaattgaccagatcttacccatggttggaattgataaaccctgctgagactttcggtgacatcgtcattgactacccatacgttgaatgtacctctgcaactatggaagccttgaccttgttcaagaagttgcatcctggtcacagaaccaaggagatcgataactgcattaaaaaggctgctaaatttttggagaagatgcaaagagctgacggttcctggtatggttgttggggtgtctgttttacttatgcaggatggttcggtataaaaggtttggttgccgctggtagaacttacaattcctgtttggctattcgtaaggcttgcgaatttttgttatctaaggaattaccaggtggtggttggggtgaatcttacttatcctgtcaaaacaaggtctatactaatttggaaggtaataagcctcatttggttaacactgcctgggttttaatggctttgattgaagccggtcaggctaagagagatccaatgccattacacagagctgctaaagttttgatcaactctcaaatgccaaacggtgatttccctcagcaagaaattatgggtgtttttaaccgtaattgtatgatcacctatgctgcttacagaaatattttcccaacctgggctttgggtgaatacagaactcaagtcttacaaaagtaa

SEQ ID NO: 185 - DNA, 2286 bp, Artificial Sequence
  Synthetic
atgtggcgtttaaaaacaggttctgaaaccgtcggggataacggtagatggttgagatcaactaataaccacgttggtagacaagtttgggagttctttcctgaaatgggttccccagaagaattggtcgctatcgaagccgctcatagagaatttcacttgaatagattccataagcagcactcttccgacttattgatgcgtttgcaatatgagagagaaaagccatgtgttcaaaaggaaggtgcagttagattggacgctactgaaaccccaactgaagccgctgtcgaaaccacattaagacgtgctttaactttctactctaccatgcaatcagatgacggtaactgggcctctgatttgggtggtcctatgtttttgttgccaggtttagttatagctttgtacgtcactggtgtcttgaactccgttttgtccaaagaacatcaaagagaaattagaagatatttatacaatcaccaaaaccaagatggtggttggggtttacacatcgagggtccatctactatgttcggttctgctttgaactacgttaccttgcgtttattgggtgaaggtccagatgacggtgaaggtgcaatggaaagagccagacaatggattttatctcgtggtggtgcagttgctgttacctcctggggtaagttgtggttgtcagtcttgggggtctatgagtgggacggtaacaatcctttgccaccagaattgtggttgttaccatactctttgcctttacatccaggtagaatgtggtgccattgtagaatggtttacttgccaatgtcctatttatacggtaagagattcgttggtcctattactccaactgttttatctttgagagaggaattgtacccaatcccttatcaccatgttgactggaacaaagctagaaacacctgtgctcaggatgatttgtactacccacacccattcgtccaggacttattgtggggttctttatatcacgtctacgaaccattggttatgagatggccaggtaagagattgcgtgaaagagccttgcaacacgtcatgaagcatattcattacgaggatgaaaattctcgttacatctgtttgggtccagttaataaagctttaaacatgttatgctgttgggtcgaagacccacactctgaagcttttaagatgcatataccaagaatttatgactatttgtggatcgccgaagatggtatgagaatgcaaggttataatggttcccaattgtgggatactgctttttccgtccaagctattgtcgccactaagttgacagacgaattttcagagaccttagcaaaggctaacaaatacatcttggatgcccaaattttgaaaaactgtcctggtgatccaaatgtttggttcagacacatccacaagggtgcttggccattctctacaagagaccatggttggttgatctcagattgcactgctgaaggtttgaaggcatccttaatgttgtcaaaattaccttctaagattgttggtgaaccattagagaaaaacagattgtacgacgctgttaacgttttgttgtcattacaaaacgaaaatggtggttttgcttcttatgaattgacaagatcctacccatggttggaattgatcaatccagccgagaccttcggtgatattgttatagattatacctacgttgaatgtacctctgctacaatggaagctttaactttattcaagaagttacacccaggtcatcgtaagaaggaaattgaaagatgtatggctaacgctgccaaattcttggaaatgagacaagaggcagacgggtcttggtacggttgctggggtgtctgttacacatatgctggttggttcggtattaagggtttggttgcagctggtagaacttacaataattgtgcaaacatcagaagagcttgcgactttttgttgtcaaagcagttgccaaatggtggttggggtgagtcctacttgtcctgtcaaaacaaattatacactaacttgaacaatgacagaatgcacaccgtcaacaccgcctgggctatgatggccttgattgaagctggtcaagctaagactgatcctatgccattgcaccatgctgcacgtaccttgattaacgctcaaatggaaactggtgactttcctcaacaagaaataatgggtgtttttaataagaactgtatgatcacttatgctgcctatagaaacgttttcccagtctgggctttaggtgaataccaccaccgtgttttgaacggttgttaa

SEQ ID NO: 186 - DNA, 2286 bp, Artificial Sequence
  Synthetic
atgtggcgtctgaagacaggctctgagactgttggtgacaacggtagatggttacgcagtaccaataaccatgtcggaaggcaagtatgggaatttttccctgaaatgggttcccccgaagaacttgttgctattgaagccgcacacagagaatttcacctaaaccgtttccataaacagcactcttcagatttgctcatgagattacaatacgagagagaaaagccatgcgtccaaaaagaaggtgctgtgagattggatgctacggagactccaaccgaagcggctgtcgaaactacattgcgtagagccttgaccttctatagcactatgcaatctgacgatggtcactgggctaatgacttgggtggcccaatgtttcttttgccaggtttggttataaccttaactatcactggtacgattaacgttgttttatccaaggaacatcaaagagaaatcagacggtacctatataaccaccagaatcaagatggtggttggggtttgcatatcgaaggaccatcgaccatgttcggtagcgcgttgaactacgttacgttgaggctcctgggggagggtcctgacgacggtgaaggagctatggagagagccagacaatggattctgtccagaggtggtgctgtcgctgtaacctcttggggtaagttatggttgtcagttttgggtgtgtacgaatgggatggtaataacccgttgccaccggagctttggcttctaccttactctttaccattgcacccaggtcgaatgtggtgtcactgtagaatggtctatttgccaatgtcgtacttgtacggtaagagattcgtcggtcctattactccaactgttctttccttaagagaagaactctacccaatcccctatcatcatgtcgattggaacaaagctagaaatacatgtgcacaagacgacttgtattatccacacccatttgttcaagatctgctgtggggttctttgtaccacgtttatgaaccattagttatgagatggcccgggaagagattgcgagaaagagccttacagcacgtgatgaaacatatacactacgaagatgaaaacaccgaatacatttgtttaggaccagtgaataaggcattgaacatgttgtgttgctgggttgaagaccctcattctgaagctttcaagatgcacattccgcggatctatgattacctgtggatcgctgaagacggcatgaaaatgcaaggttacaacggcagtcaattgtgggatactgccttcgccgtccaagctatcgttgctacaaagttgactgacgaattttccgaaaccttggccaaagctaataagtacattttggacgctcaaatactgaagaactgtccaggtgatcctaatgtatggtacagacatattactaagggggcttggtctttttctaccgcggatcaaggttggcttgtttcagactgtaccgctgaaggtttgaaggcattattgttgtactctatgctcccacaccagaaagccccatccagcatcgaaaagaaccgtctttatgatgctgtaaacgttttactatctatgcaaaacgctgatggtggtttcgcttccttcgaacttacgcgtagttatccatggttggaaatgattaacccagccgaaacattcggtgacatagtcatcgattacacttacgtcgaatgtacctctgctgtgattcaagcattggctttgttcaagagattgcacccgggacacagaaagaaggaaatagagaggtgtatggctaacgcagctaaatttttggagatgagacaagaagccgatggctcatggtatggttgctggggtgtttgttatacatacgccggttggtttggtatcaaaggtctaacctcctgtggtagaacttacaataattgcgccaacattagaagagcttgcgactttttattgtcgaaacaactgccaaatggtggttggggcgagtcctacttgagctgtcaaaacaagttgtacaccaatttgaacaacgaccgtatgcacactgtcaatactgcttgggctatgatggcgttaattgaagctggtcaagccaagactgacccaatgcccctacatcatgctgctagaaccctaattaatgcacagatggagaccggcgactttccccaacaagaaatcatgggtgttttcaataagaattgtatgatctcttacgccggttatagaaacgttttcccagtatgggctttaggcgaataccatcacagagtgttgaacggttgttaa

SEQ ID NO: 187 - DNA, 2226 bp, Artificial Sequence
  Synthetic
atgtggcgtttgaagatcgcagagggtaaagaaggtccttacttaaagtcaacaaacaattttgttggaagacagacctgggaatttgacccagatgccggtactccagaagaaagagctgctgtcgaagaagccagacgtgctttctattctaacagatacagagttaaaccaccagctgatttgttatggagattgcaattcatgagagagaagaatttcaagcaaattattcctatggtcagaatcaaggacggtgaagctataactcacgaaaaagcaaccgccactttgagaagagccgttcatttcttgactgtcttacaatccatcgacggtcactggccagctgagaacgctggttgccattactttttgccaccattagttttttgtttgtatattacaggtcacttgtcttccgttttctctcaagaacatcaaagagaaattttgcgttacatctataatcaccaaaacgaagatggtggttggggtttacacatcgaaggtcactctattatgttctccaccgctttgtcttacatatgtttgcgtattttgggtgaaggtttagaaggtggtcaggacaacgcttgtgctaaggctcaaaaatggattttagatcatggttcagttactcacataccttcctggggtaagacctggttgtctgtcttgggtttgttcgattggtccggttcaaatccaatcccaccagaattttggatgttaccatcttttttacctattcatccaggtaagatttggtcatactgccgtactacatatatgccaatgtcctacttgtatggaaagaagttcgtcgctcctatcaccccattgattatccaattaagaaaagagttgtacttgcaaccatacgacgaaataaactggagaaaggttagacatttgtgtgcaaaggaagatttgtattacccacacccagttattcaagatttaatgtgggactgtttatacgtcttcactgaacctttgttgaatcgttggccattgaacaagatgatcagagaaaaagccttgaaggttaccatgaaccatattcactacgaagatgagaactcttcttatatcaatatggcttgtgtcggtaaagttttgtgtaccttggcttgctgggttgaagacccaaacggtgactacttcaaaaagcacttggccagaatcccagattacatttgggtcgctgaagatggtatgactatgcaaggtttggcctctcaaacttgggactccggtttagctatccaagcattgtttgcctccaacttgatagatgaaattggtccaactttaaagagagctcatgatttcatcaagaagtctcaagttttagacaatccttttggtgactttaaaaagatgttcagacactcctctaagggttcatggaccttctcagtcagagatcacggttggcctgtttctgactgtacagctgaaggtttgaaatgctgtttgttgttgtctatgttaccacaagagattgttggtgaaaagttagaagttgagagattgcatgatgctgtcaatatcattttccacttacaatccaagaacggtggtgtcgccgcatgggaacctgttagagcatccaaatggttggaattgttgaatccaatcgaatttttggaagatatagttgtcgaccatgagtatttagaatgtaccgcttcttctatagacgctttacagttatttaagaaattataccctacttgtgagcgtgaagaaattgaaaacttcatcttgaaggctgttgaatatatcgaaaacattcagatgtctgatggttcttggtatggtaactggggtgtctgcttcatctacggtacattgttcgctttgaagggtttagctaaggcaggtaagacttatgacgattgtgtcgctatgagaaaaggagttgattttttgttaagaatccaaagagacgatggtggttggggagagtcatacaagtcctgtccaaataaaaagtttgaaccattgcagagagaaggttccaacgtcgtccaaactgcttgggccattttaggtttgattgagtctcgtcaaattatgagagacccaaccccattgcacagagcaataaagttcatcatcaactctcaattagaagatggtgactttccacaacaggttagaggtttgtcctacatttattcatctttgtcctttttgccagttattaagatgtaa

SEQ ID NO: 188 - DNA, 2301 bp, Artificial Sequence
  Synthetic
atgtggcgtttaaagatcggtgccgacaccgtcttgacagatccatcaaatgcaggaggtagatggttgtctactttatccaaccatttgggtagacaggtttgggaattttgtgctgagttgggttctcctgaagacttgcaacaaatacaacacgctagacaaagattctccgatcacagattcgaaaaaaagcattctactgacttattgatgcgtatgcaatttgctaaggaaaactcatctttcgttaatttgccacaaattaaagtcaaggataaggaggatgttaccgaagaagccgtcactagaactttgaaaagagctattaacttctattctaccatccaggcacacgacggtaactgggcttccgacttaggtggtccaatgtttttgttgcctggtttagttattgctttgtacgttacaggtgttttgaactccgtcttgtctaccgaacatcaaagagaaatctgccgttacttatataatcaccaaaacagagatggtggatggggtttgcatatcgagggtccatctactatgtttggttccgtcttgaactacgttactttaagattattgggtgaagaagccgaagacggtcaaggtggtgtcgataaggctagaaagtggattttagatcacggtggtgctaccgccataacatcatggggtaagatgtggttgtctgttttaggtgtttacgaatgggcaggtaataatccattgccaccagaattgtggttgttaccatacttgttgccttgtcatccaggtagaatgtggtgtcactgtagaatggtctatttgccaatgtgttacttgtatggtaagcgtttcgttggtcctattacaccaattatcagatccttgagaaaagagttgtacttagttccttatcacgaagttgactggaacgtcgctagaaaccaatgcgctaaagaagatttgtactatccacatccattagtccaggatgtcttatgggcctctttgcatcacgtttacgaaccattgttcatgtgttggcctgctaagagattgagagagaaggcattaagaactgttatgcaacacatacactacgaagatgaaaattctcgttacatctgtttgggtccagtcaacaaagtcttgaacatgttgtgctgttgggttgaagacccacattccgaggctttcaagttgcatattcctcgtttgtatgactacttatggattgctgaagacggtatgagaatgcagggttacaatggatcacaattatgggatactgccttttctgtccaagctatcatgtctaccaaattgtcagaagaatacggtaccactttgagaaaggcccacaagtatattcaagattcacaagttcaagaagattgcccaggtgatccaaatgtttggtttagacatatacacaaaggtgcttggccattctccactagagaccatggttggttgatctctgactgtacagctgagggtttgaaggcctctttgatgttatctaagttgccttccaagatcgttggtgaaccattagaaaaggaaagattgtatgacgctgttaacgttttgttgtcattgcaaaacgaaaacggtggtttcgcctcctacgagttgaccagatcttatccatggttggaattaattaacccagctgaaaccttcggtgatattgttatagactacccatacgttgaatgtacttccgctgcaatccaggctttggctgcctttaagaaattgtacccaggtcacagatctaatgaaattggtaactctatagctaaagccgctgacttcattgaatcaatccaagcaacagatggttcttggtacggttcttggggtgtctgtttcacctacgctggttggtttggtattaagggtttagtcgctgctggtagaacttacaattcctgctcctctttgagaaaggcttgtgatttcttaatgtccaaggaattggcagccggtggttggggtgagtcctacttgtcctgtcaagataaggtttataccaacatcaaagatgatagaccacatttggtcaacactggttgggctatgttgtcattaatcgacgctggtcaagctgaaagagatcctacaccattgcaccgtgctgccagaatattgattaattcccaaatggaagacggtgactttccacaggaagagatcatgggtgttttcaacaagaattgtatgattacttatgcagcttatagaaacatctttccaatttgggcattaggtgaataccgttgcagagtcttacaagcctcttaa

SEQ ID NO: 189 - DNA, 2292 bp, Artificial Sequence
  Synthetic
atgtggaggctcaaagttggggcagaaagtgtaggagagaaggaagaaaaatggctaaagtccatatctaaccacttgggccgacaagtgtgggaattttgtgcgcatcagcctaccgcttcgccgaatcatcttcaacagattgacaatgcccgcaaccatttccgtaataatagatttcacagaaaacaatcatctgatttattcttagctatccaaaacgagaaggaaattgcaaatgtcacaaaaggtggtggtattaaagttaaggaggaagaggatgtcagaaaagaaacggtaaagaacactgttgaaagggccttgagcttttactcagctatacaaactaatgacggaaattgggcaagtgatctaggcggtccaatgttcctgttgccaggactggtaatcgctctatatgttacaggtgttttaaattccgtgttgagcaagcatcacagacaggagatgtgccggtatttatacaaccatcaaaacgaagatgggggatggggtctgcatatcgaagggacttcgaccatgtttggttctgcccttaattatgtggccttgagattattaggcgaggatgcggacggtggcgaaggcggtgctatgacaaaagcacgtagctggattctggatcgtggtggggcaacggctataacttcttggggaaaattgtggctttcagtgttaggagtctatgaatggtccggtaacaaccctttgcccccagaattttggctcttaccctactgtcttcctttccacccaggccggatgtggtgtcattgcagaatggtatatctaccgatgtcgtacttatatggtaaaaggtttgttggaccaatcacgcctatagtcttgagtttaaggaaggaactttatacaattccctaccatgaaatcgattggaatagatctcgaaatacttgcgctaaagaagacttgtactatccacatccgaagatgcaagatattttgtggggctcaatttatcacctgtatgaacctcttttcaccagatggcctggcaaacgcttaagggagaaagcactccaaatggctatgaagcacatacactacgaggatgaaaactctcgatatatatgtctcggtccagttaacaaagtcttaaatatgctatgttgttgggtggaggacccatacagtgacgcattcaaatttcatttgcaaagagttcctgattacctatgggtagcggaagatggaatgagaatgcagggttataatggctcccagctgtgggatacagcgttttctgtacaagccattatttcaactaaacttatagattcttttggtaccacattaaaaaaggcccatgatttcgttaaagactctcaaatccaacaagactgccctggggatccaaacgtctggttcagacatattcataagggggcttggcccttttccacccgggatcacggttggctaatttcagattgtacggctgaaggtttgaaggctagcttaatgctaagtaagttgcctagtaagattgtcggagaacccctcgaaaaatcgcgtttatgcgacgccgttaatgttctgttatcgttgcagaatgagaacggcggttttgcaagctacgaactcacgaggtcctatccatggctcgaactaatcaatccagctgagacatttggagatatagtgatagactatccgtatgtcgaatgtacctcagcaactatggaagcattgaccctcttcaaaaaacttcatccgggtcatagaactaaagaaattgacatcgcagttgctagagcggccaatttccttgaaaatatgcaaagaaccgacggttcatggtatgggtgctggggcgtatgttttacttacgctggatggttcggtataaaaggtttagtcgcagcgggtagaacatataatagttgtgtagctattcggaaagcctgtgattttttactttctaaggaattgcccggagggggttggggcgagtcctacttatcctgccagaacaaagtttatactaaccttgaaggcaatcgtcctcatctggttaacactgcatgggtgctgatggccttgatagaagctggccaggctgagcgtgatccagcaccattgcatcgtgcagcgaggttgttgattaattcgcaactagagaatggtgatttcccacaagaagaaataatgggagtgtttaacaagaactgtatgattacatacgctgcttaccgcaatattttcccgatctgggcactaggagagtattttcacagggtattaacagag

SEQ ID NO: 190 - DNA, 2292 bp, Artificial Sequence
  Synthetic
atgtggaggctcaaagttggggcagaaagtgtaggagagaaggaagaaaaatggctaaagtccatatctaaccacttgggccgacaagtgtgggaattttgtgcggaccagcctaccgcttcgccgaatcatcttcaacagattgataatgcccgcaaacatttccgtaacaatagatttcacagaaagcaatcatctgatttattcttagctatccaaaatgagaaagaaattgcaaacggtacaaaaggtggtggaattaaggtcaaagaggaagaggacgttagaaaggaaacggtgaaaaacactgttgaaagggccttgagcttttactcagctatacaaactaatgatggcaattgggcaagtgatctaggtggaccaatgttcctgttgccaggtctggtcatcgctctatatgtaacaggcgttttaaattccgtattgagcaagcatcatagacaggagatgtgccggtatttatacaatcaccaaaacgaagacgggggttggggactgcatatcgaagggacttcgaccatgtttggttctgcccttaattatgtggccttgagattattaggcgaggatgcggatggtggcgaaggtggtgctatgacaaaggcacgtgggtggattctggaccgtggaggggcaacggctataacttcttggggtaaattgtggctttcggtattaggagtttatgaatggtcaggcaacaaccctttgcccccagaattttggctcttaccctactgtcttcctttccacccaggtcggatgtggtgtcattgcagaatggtgtatctaccgatgtcatacttatatggtaaaaggtttgttggaccaatcacgcctatagtcttgtccttaaggaaggaactttatacaattccctaccatgaaatcgattggaacaaatctcgcaatacgtgtgctaaagaggatctatattatccacaccccaaaatgcaagatattttgtggggcagtatttaccatttatatgaacctctgttcactagatggccaggaaaacgcctgagagaaaaggcattgcagatggctatgaagcatatacactacgaagacgagaatagtagatacatttgcttgggtcctgtgaataaagttctgaacatgttgtgttgttgggtagaggatccgtacagtgacgcgtttaaattccatttacaaagagttccagactacctatggatagcagaagatgggatgagaatgcaaggttataatggctcgcagctatgggacacagctttttcagtccaagcaattatctctactaagctgattgattcttttggcaccactttgaaaaaggcacatgatttcgttaaagattctcagattcaacaggattttccaggtgacccgaatgtctggttccgacacatccacaagggtgcctggcccttttcaacccgagatcatggctggttgatatccgattgtacagccgaagggttaaaggcgagccttatgttaagcaagttaccttcgaaaattgtaggtgaaccattagaaaaaagtagactatgcgatgcagttaacgttcttttatcactacaaaatgaaaacgggggctttgctagctacgagttaaccaggtcatatccatggttggaattaataaaccctgccgaaacgttcggagacattgtgattgattatccatacgtagagtgtacctccgcaactatggaggctcttactctttttaagaaattacacccaggtcatcgtacaaaagagattgatacagcggtcgccaaggctgctaatttcctcgaaaatatgcaaagaaccgatggaagttggtacggatgctggggtgtctgttttacttatgccggttggtttgggattaagggtttggttgccgcagggcgcacatattccacttgcgtcgccatcagaaaagcttgtgatttcttgttgtcaaaagaattaccaggcggtggatggggtgaatcttatctatcttgtcaaaacaaagtctatactaatctcgaaggtaataggcctcatttggtgaatacagcttgggttctgatggccctcatcgaggctggtcaagcggaaagagatcccgcaccactacatcgtgctgcaaggctcttgatcaattcacaattagagaacggtgattttccgcaggaagaaatcatgggtgtattcaacaagaactgcatgataacctacgccgcttataggaatatttttcctatatgggctcttggagagtactttcatagagtgctaactgag

SEQ ID NO: 191 - DNA, 2295 bp, Artificial Sequence
  Synthetic
atgtggcgtttgaaggttggtgccgagtctgtcggcgaaaaagatgaaaagtgggttaaatccgtctcaaaccacttaggtagacaagtttgggaattttgcgcagacgctgccgctgatacccctcatcagttgttgcaaatccaaaatgctagaaaccacttccatcacaatagattccatagaaagcaatcttccgacttatttttggctattcaatacgaaaaggagattgctaagggtgccaaaggtggtgctgttaaggtcaaagaaggtgaagaagttggtaaggaagccgtcaagtctactttagagcgtgctttgggtttctattctgctgttcagacatcagacggtaactgggcttctgatttaggtggtccaatgtttttgttgccaggtttggttatcgcattacacgtcactggtgttttgaactccgtcttgtccaagcaccatagagttgaaatgtgtagatacttgtacaaccatcaaaatgaagatggtggttggggtttgcacatagaaggtacctctactatgttcggttctgctttgaattatgttgccttgagattgttaggtgaagacgcagacggtggtgatggtggcgctatgaccaaggctagagcatggatattagagagaggtggtgctacagctatcacttcatggggtaagttgtggttgtccgtcttaggtgtttacgaatggtccggtaacaacccattaccaccagaattttggttattgccttattctttgccattccatcctggtagaatgtggtgtcactgtagaatggtctacttaccaatgtcttatttgtacggtaagcgtttcgttggtccaattactccaaaagtcttgtctttgagacaagagttgtacaccattccatatcacgaaatcgattggaataaatcccgtaacacctgcgctaaggaagacttatactatcctcacccaaagatgcaagacattttgtggggttctatctaccatgtctacgaacctttgttcactagatggccaggtaaaagattgcgtgagaaggccttacaagcagctatgaaacatattcactatgaagatgaaaactcaagatacatctgtttgggtccagttaataaggttttaaacatgttatgttgttgggtcgaagacccatactccgatgccttcaagttgcacttgcagagagtccacgattacttgtgggttgctgaagacggtatgagaatgcaaggttacaatggttcccaattatgggataccgccttttctattcaagctatagtcgcaactaagttagttgattcttacgcacctactttgcgtaaggctcatgacttcgtcaaagactcacaaatccaagaagattgtcctggtgacccaaatgtttggtttagacacattcataagggtgcctggccattttccacaagagaccacggttggttgatttcagattgtacagctgaaggcttaaaggcttctttgatgttgtctaagttaccttccactatggttggtgagccattggaaaagaacagattgtgtgatgctgtcaacgttttattgtctttgcagaacgacaacggtggtttcgcttcttatgaattaaccagatcctacccatggttggaattgataaatccagctgaaactttcggtgacattgttatcgattacccatatgttgaatgcactgccgccaccatggaagctttgactttattcaaaaagttgcaccctggtcacagaacaaaggaaatcgataccgcaatcggtaaagctgctaacttcttagagaaaatgcaaagagccgatggttcttggtacggttgttggggtgtttgttttacttacgctggttggttcggtattaagggtttggttgcagctggtcgtacctataattcttgcttggctattagaaaggcctgtgaatttttgttgtccaaggaattgccaggtggtggttggggtgaatcttacttgtcctgtcaaaacaaagtctacaccaacttggagggtaacaagccacatttagtcaacaccgcttgggttttaatggctttgatcgaagctggtcaaggtgaaagagatccagctcctttgcatagagcagcccgtttgttaatgaactcccaattggaaaatggtgattttgttcaacaggaaataatgggcgttttcaataaaaactgtatgattacatatgctgcctatagaaatatcttcccaatttgggctttgggtgaatattgccacagagtcttaactgaataa

SEQ ID NO: 192 - DNA, 2322 bp, Artificial Sequence
  Synthetic
atgtggaggctcaaagttgggaaggaaagtgtaggagagaaggaagaaaaatggataaaatccatctctaaccacttgggccgacaagtgtgggaattttgtagcggtgagaatgaaaatgacgatgatgaggcaattgcggttgccaacaattcagcttctaagttcgaaaatgctcgtaaccattttcgcaataatagattccatagaaaacagtcgtccgacctatttttagcaattcaatgcgaaaaggaaatcattagaaacggtgccaaaaacgagggtacaaccaaggtcaaagaaggagaagatgtaaaaaaggaagcagtgaagaatacgctggaaagggctctttcgttttattcagcggttcaaacttcagatggcaattgggccagtgacctaggtggacctatgttcttattgccaggtttagttatagccttgtacgtcactggcgtacttaactcagttttgtctaaacaccatagacaggagatgtgtaggtatatttacaaccatcaaaatgaggatgggggttggggtttgcacatcgaaggttctagtacaatgtttggctctgctctcaattatgtcgctttaagacttttgggtgaggcagcagatggtggggaacatggggctatgactaaagcacgaagctggattttagaaagaggaggtgctaccgcgataacttcgtggggaaaactgtggctttccgtgttaggcgtttatgaatggtctggaaataatcccctaccaccggaattttggcttttaccttactccttgccattccatccgggtcggatgtggtgccactgtcgtatggtctacttgcctatgagctatctgtatgggaagcgcttcgttggaccaataacacctatcgtgctctcactcagaaaggaattatacacgattccctatcatgagattgattggaaccggagtcgaaatacctgcgccaaagaagatttatattatccacatccaaaaatgcaggacattttatgggggagtatctaccatgtatacgaacctctgttttctggttggcccggcaaacgtctaagggagaaggccatgaaaatcgctatggaacacatacactatgaagatgagaatagcagatacatttgtttgggacccgttaataaggtactgaacatgctatgttgctgggttgaagacccttattcagatgctttcaagtttcacctacaaagaatcccagactacctctggttggcagaagatggtatgaggatgcaaggatacaatggttcacaattgtgggatacagctttttcaatacaagctattatctcaacaaaattaattgacacatttggcccaactcttcgtaaagcgcatcatttcgtaaaacactctcagatacaagaagactgtcccggcgatccgaacgtttggtttagacatatccataaaggagcctggccattttccactagagatcatggttggctgatttcggactgcaccgcagaaggcctaaaagccagtcttatgctctctaagttgccttctaagatagtcggtgagcctttggaaaagaatagattatgtgacgccgtcaatgtgctgttgtctttacagaacgagaatggtggcttcgcaagctatgaattgactagaagctatccatggctggagctgattaaccctgctgaaacattcggcgatattgtcattgattatagttacgtagaatgtacctctgcgactatggaggcattagctttattcaaaaagttacatccaggacaccggacgaaagaaattgacgcagccatcgcgaaagccgctaatttcctagaaaacatgcaaaaaacagatggttcatggtatggttgttggggtgtgtgttttacctatgctggctggtttggtataaaaggtttagttgccgcaggtcgcacctataataattgcgttgctatacgtaaggcttgcaactttctattatccaaggaattgccgggtggcggatggggagaatcttatttgagttgtcaaaacaaagtttacactaacttagagggtaacaaaccgcaccttgtaaatacggcttgggtcatgatggcattaatcgaggcagggcagggtgaaagggacccagcccctttacatagagctgcaagattgttaattaacagtcaattagaaagtggtgatttcccacagcaggagattatgggcgtgtttaataaaaactgtatgatcacatacgccgcttacagaaacatatttcctatatgggcattaggggagtattcacatcgtgttcttgatatg

SEQ ID NO: 193 - DNA, 2172 bp, Artificial Sequence
  Synthetic
atgtggcgtttaaagttgggtaaaggagagaacgaagattacttgttttctaccaatgacttcatcggtagacaaacttgggaatttgatcctaacgctggtacaccacaggaaagagcccaagttgaagctgcaagattaaatttctatcaaaacagaaaccacgtccaatgttcatccgacttgttgtggagattccaatttttggaagagaagaacttcaaacaagctataccaaaggtcgttgttgaagaacgtaatggtaacgatagagaattatctattaagaaggagaccgttaagactgccttgagacgtgctactaacttctttgctgcattacaatccaatcatggtcactggccagctgaaaatgccggtccattgtactatttgcctccattggtcttcgctttgtacattactagagacttgaacaccatcttgtctaaagaacatcaaaaagaaattttaagatacgtttattgccaccaaaatgaggatggtggttggggtttgcacatcgcttctcgtcagtcatgtatgttatgtactgtcttgaactacattgaattaagattattgggtgaagaagctgataacgaagcatgctccagagccagaaagtggatattggaccatggtggtgctttgtacatcccatcttggggtaagatttggttgtctatcttgggtttatatgaatgggaaggtaccaaccctatgccaccagagatttggatgttcggtaagatattgccatggaacttgggtggtttgttatgttacacaagattaaccttattgccaatgtcctacttgtatggtaagagatttgttggtcctttgaccccattaatcttacagttgcgtcatgaaatttacactcaaccatataatgacatcaaatggtcaccagctagacacttgtgtgccaaggaagatgaatacttcgaaagatctattttccagaagttagtttgggacgtcgttacatacgtcggtgaaccaatcttgaagtcctgggcttttaagaaaattagaaatcgtgctatacaaatcgccaagtggtacatggactatgaggatcaaaactcacattacatcactattggttgtgttgaaaagcctttgtttactttgacatcttgggttgtcgatcctcacggtgaagcatataaaaagcatttagctagaataaaggactacttgtgggtcggtgaggacggtatgaagatgcaatcattcggttcccaatcttgggatgttgcatttgctattcaagctattttggctaccaacttacaccacgaattttctgaaactttaaaaaaaggtcacgacttcatcaaacaatctcaagttaagaagaatccatccggtgatttcccaagaatgtacagacatatctccaaaggttcttggaccttttcagatcaggatcacggttggggtgtctccgactgtgctgctgaaaacttgttgtgctgtttgaagttgtctactatgccttcccatattgttggtgattctatggaaccacaatgtttctttgaagccgttaatttcatattgtcattacaagccaaagacggtggtttgtctgcctgggaaccagctggaacattgcctttgtggtttgaagttttgaatcctgttgaatttttcgagtacactgttttggaaattgagtgtgtcgaatgtacttcctctgccattcaagctttggtcttgtttaagaagttgttcccatcccacagaaaaaaagaaattgataacttcatcgaaaaggccaccaattatattaaggaaatccaaaaggaggacggttcttggtatggtaactggggtatttgtcacatctacggtacttacttcgctataaaaggtttagctgctgctggaaatacttacgaaaattgctccaccgtcactaaggctgtcgatttcttgttgaagatccagtgtccagacggtggttggggtgaatctcatatctcttgcttgaacaaagtccatactccattaccaggtaacgcatctaacttggttcaaacctcattcgctttgatgtctttaatccactcccaacaagtctgtttttttttattcttcttcttcccatcatttttaccaatttgcactttgccttccttgataattatcttctaa

SEQ ID NO: 194 - DNA, 2298 bp, Artificial Sequence
  Synthetic
atgtggcgtttaaaggtcggtgctgacacagttccagccgatccttctaaatcaggcggttggttgtccactttgtctaatcatttgggtagacaggtttgggaattttgtgcagagttgggttccccagaagatttacaacaaatacaacacgctagacaacacttctctgaccatagattcgaaaagaagcactctgctgacttattgatgagaatgcaatttgccaaagaaaactcatcattcgtcaacttgccacaaatcaaggttaaggataaggaagatgtcatggaggaagctgttaccagaactttgaaacgtgctattaatttttactccaccatccaggccgatgacggtaactgggcatctgacttgggtggtcctatgttcttgttaccaggtttggtcattgctttgtatgttactggtgttttgaactctgttttgtccaccgaacatcaaagagaaatttgcagatacttatacaatcaccaaaacagagatggtggttggggtttacacatcgaaggtccatccaccatgttcggttctgttttaaattatgtcactttgagattattgggtgaggaagctgaagacggtgaaggtggtgttgacaaggccagaaaatggatcttagatcatggtggtgctacagctataacttcatggggtaagatgtggttgtccgtcttgggtgtctatgaatggaccggtaacaatccattaccacctgaattgtggttgttgccatacttgttaccagttcacccaggtagaatgtggtgtcattgtcgtatggtttacttaccaatgtgttacttgtatggtaagcgttttgtcggccctattaccccaattattagatctttgagaaaggaattgtacttggttccataccacgaggtcgattggaacgaagctagaaacttatgcgccaaagaggatttatattaccctcatcctttggtccaagacatcttgtgggcttctttacaccacgtttacgaaccattgttcatgagatggccagctaagcgtttgagagaaaaggcattaagaactgttatgcaacatattcactatgaagacgaaaattcccgttacatctgtttgggtccagtcaacaaagttttaaacatgttgtgttgttgggttgaggatcctcattctgaagccttcaagttgcacatcccaagagtctatgattacttgtggattgcagaggacggtatgagaatgcaaggttacaacggttctcagttatgggatactgctttctccgttcaagctataatttccacaaagttggctgaagaatacggtaccactttaagaaaggcccacgaatacatcaaagactctcaagtcttggaagactgtccaggtgaccctaacgtttggtttagacacatacacaagggtgcttggccattttcaactcgtgatcatggttggttgatttctgattgcaccgctgaaggtttgaaggcatcattgatgttgtctaaattgccatctaaaattgtcggtgaaccattagaaaaagaaagaatctatgattcagttaatgtcttattgtctttacagaatgagaacggtggtttcgcttcctatgagttgacaagatcctacccatggttggaattaattaacccagctgaaacttttggtgacatcgttatagactacccttacgttgaatgtacttccgccgctatccaagctttggccgcttttaagaagttatacccaggtcaccgttctaacgaaattggtaactgtatcgccaaggctgccgatttcattgaatccatccaagctaccgatggttcttggtatggctcttggggtgtttgtttcacatacgcaggttggttcggtattaagggtttggttgccgctggtagaacctacaacaattgcttgtcattgagaaaagcttgtgattttttgttatctaaagaattagccggtggtggttggggtgaatcctatttgtcctgccaagataaggtctacactaacattaaagatgacagacctcatattgtcaataccggttgggctatgttgtctttaatagaggttggtcaagctgaaagagacccaacaccattgcacagagccgcacgtatattgattaactcacaaatggacgacggtgattttcctcaagaagagatcatgggtgttttcaacaagaattgtatgatcacttacgcagcttacagaaacattttcccaatttgggctttaggtgaatacagatgtagagtcttgcaagctccataa

SEQ ID NO: 195 - DNA, 2358 bp, Artificial Sequence
  Synthetic
atgtggcgacttaaggtcggcaaagagtccgtgggagaaaaggaagaaaagtggataaaatcaatcagtaaccacctgggtcgtcaggtttgggaattttgtgccgagaatgacgatgacgatgacgatgaagcagttattcatgtcgtagctaacagctctaagcacctattacaacaacaaagaagacaatcttctttcgaaaacgctaggaagcaattcagaaataatagatttcatagaaaacaaagttccgatctcttcttgaccatccagtacgaaaaggaaattgctcgcaacggtgcgaagaacggtggtaatactaaggttaaagaaggtgaagacgtcaaaaaggaagctgttaacaatacgttggagagagccttgagcttctattcggctattcaaactggtgatggtaactgggcaagtgatttgggcggtccaatgttcttgttacctgggttggttatcgctttatacgtcacaggtgtgttgaactccgttctatctaagcaccatagacaagaaatgtgcagatatatctacaaccaccaaaatgaagacggtggatggggtttgcatattgaaggttcatctaccatgtttggtagtgcccttaactacgtagctttgcgtttattgggtgaagacgctaacggaggtgagtgtggtgcaatgactaaggctagatcctggatactggaaaggggtggggccacagctattacttcttggggtaagctctggttgtccgttctaggtgtctacgaatggtctggcaataatcccttaccaccggaattttggttgttaccatattctttgccattccacccaggtagaatgtggtgtcactgccggatggtctacttgcctatgagttatctatacgggaaaagatttgttggtccaattaccccaatggtgttgagcctaagaaaggagctttacaccattccctatcatgaagttgactggaacagatctcgtaacacttgtgcccaagaggatttgtactacccacacccaaagatgcaggacatcttatggggttccatttatcatgtttacgaaccgctattcaacggttggcctggtagaagattgagggaaaaagctatgaagatagcgatggaacacatccactatgaagatgagaactctcgttacatctgtttgggtccagtcaacaaagtcttgaacatgctgtgttgttgggtcgaagatccatactctgacgctttcaagtttcacctgcaacgaatccccgattatttgtggttagctgaagatggcatgagaatgcaaggttacaatggttcacaattgtgggacacggccttttccattcaagctatattatccactaaattgattgacaccttcggttccaccttgagaaaggctcatcattttgtgaagcattctcaaattcaagaagattgtccaggcgatccaaacgtttggttcagacacatccataagggtgcttggccgttctcaactagagaccacggttggctaatttcagactgtacagccgaaggacttaaggcgtctttaatgttgtctaaattgccttctaaaatcgttggtgaaccattggaaaagaatagattgtgcgacgctgttaatgtattgctttccttgcagaacgagaatggtgggttcgcttcttacgaattgactagatcctatccatggttagaactcattaaccccgcagaaaccttcggtgacatcgttattgattacagctatgtcgaatgtacgtcagccactatggaagctttggccctctttaagaaactccatccaggtcacagaacaaaggaaatcgacgctgctcttgccaaggcggctaacttcttagagaatatgcaaaggacggatggttcttggtacggttgctggggtgtgtgttttacctacgcaggttggttcggcatcaaggggctagtggctgctggtaggacttacaacaactgtgttgccatcagaaaggcttgtcatttcttgctaagtaaagagttgccaggtggtggttggggagaatcctacctcagttgccaaaataaggtttatactaacttagaaggaaacagaccacacctagtcaataccgcctgggtattgatggcattgatcgaagctggtcagggtgagagagatcctgctccactgcatcgcgccgctagattgttgattaactcgcaattagaaaacggtgattttccacaacaagaaattatgggtgttttcaacaaaaactgtatgattacttacgctgcttatcgaaatatatttccgatttgggccttaggtgaatactcgcaccgtgttttgactgaataa

SEQ ID NO: 196 - DNA, 2295 bp, Artificial Sequence
  Synthetic
atgtggcgtttaaaagtcggagccgagtcagttggcgaaaaggatgaaaagtgggtaaagtccgtgtctaatcacttgggtcggcaggtttgggaattttgtgctgacgcagacgctgtcaccccacatcaaagtctacaaatccacaacgctaggaaccatttccaccaaaatagattccgtagaaaacaatcctctgatctgtttttggcgattcaatacgaaaaggaaatagccaagggtgttaaagttggtgctgtcaaggttaaggagggtgaagaagttggtaaggaagctgtaaaatctactcttgaaagagcattatcgttctatagcgctgtccaaacgtcggatggtaactgggcctctgacttgggtggtcctatgttcctcttgccagggttggtcattgctttgtacgtcactggtgttttaaactccgttctatctaagcatcacagattggaaatgtgcagatatctttacaaccaccagaatgaagacggaggttgggggttgcatatcgagggtacatccaccatgtttggatcagctttaaattacgtggcattgagattgcttggtgaagatgctgacggtggtgatggtggtgccatgactaaggctagagcctggattttggaacgaggcggtgctaccgctattacttcttggggcaaattatggctgagtgttttgggtgtgtatgaatggtctggtaacaatcccctaccaccggaattttggttgctcccatactctctaccattccatcctggtagaatgtggtgtcactgtagaatggtttacttaccaatgtcctacttgtatggaaaaagattcgtcgggccaatcacccctaaggtcttgtccctaagacaagagttgtacaccgtaccataccatgaaatcgattggaacaaatctaggaacacatgtgcaaaggaggatttgtactatccacacccaaagatgcaagacatattatggggttcaatttatcatgtgtacgaacccttgtttactagatggcctggtaaaagattacgtgaaaaggctttgcaaactgcgatgaagcacatccactatgaagatgaaaacagcagatacatatgtttgggtccagttaataaggttctgaatatgttatgctgttgggttgaagacccatacagtgatgctttcaagttacacttgcaacgcgtccacgactatttgtgggtcgctgaagatggtatgagaatgcaaggttataacggttcgcaattgtgggacacagccttcagtattcaggcaatcgtcgctactaaacttgtcgattcatacggccccactctacgcaaggctcatgactttgttaaagattcacaaatccaagaagactgtccaggtgacccgaacgtttggtttcgacatattcacaagggtgcttggccattctctacaagagatcatggttggttaatttccgactgtactgccgaaggtttgaaagcgtctttgatgttgagtaagttaccatcaaccatggttggagaacctttggaaaagtctcgactatgcgatgcggtaaacgttctgttgtcccttcaaaatgataacggtggttttgcttcttacgaattgaccagatcgtacccatggcttgagctaattaatccagctgagacattcggtgatatcgtaatcgactacccatatgttgaatgtaccgcagccactatggaggctcttacgttattcaagaaattacatccgggccacagaactaaggaaattgacaccgctatcgctaaagccgctaattttttggaaaagatgcaaagaactgatggttcttggtatggttgttggggtgtttgtttcacttacgctggttggttcggaatcaagggtctcgtcgctgctggtcgtacatataactcctgcgtagccattagaaaagcttgcgaatttttgttatctaaggaacttccaggtggtggctggggcgagtcttacttgtcctgtcaaaacaaggtctacaccaatctcgaagggaacaagcctcacttggtcaacactgcatgggttttaatggccttgattgaagctggtcagggggagagagatccggctcccttacacagagccgccagattgttgatgaactcgcaattagaaaatggagacttcctccaacaagaaatcatgggggttttcaataaaaactgtatgataacgtacgccgcttacagaaacatattcccaatttgggcgttgggtgaatactgtcaccgcgtcttgacggaataa

SEQ ID NO: 197 - DNA, 2298 bp, Artificial Sequence
  Synthetic
atgtggcaattaaaggttggtgccgatacagtcccttccgacccatctaacgctgggcgttggttgtctaccttgaataaccatgttggtagacaggtctggcactttcacccagagttaggttcaccagaagatttgcaacaaatccaaaatgcaagacaacatttctacgaccacagattcgaaaaaaagcattcctctgacatattgatgagaatgcaatttgctaaagaaaactcttcattcgttaacttacctcaaattaaggttaaggaaaaggaagatgtcgttgaagaggctgttactcagactttgcgtagagccatgaatttctattccaccatccaggctgatgatggtcactggccaggtgactacggtggtccaatgtttttgttgccaggtttggtcattactttatctattactggtgctttgaacgccgttttatcaaccgaacatcaaagagaaatctgccgttatttgtacaatcaccaaaacagagatggtggttggggtttgcacattgaaggtccatccacaatgttcggttctgtcttgtcctacgttaccttgagattattgggtgaagaagctgaggacggtcaaggtggggtcgaaaacgcaagaaaatggatattggatcatggtggtgctacagctattacttcttggggtaagatgtggttatcagtcttgggtgtttatgagtgggctggtaataaccctttgccacctgaattgtggttattaccatacttattgccatttcacccaggtagaatgtggtgtcattgtagaatggtctacttaccaatgtgttatttgtacggtaagagattcgttggtcctatcactccaatcatcagatctttgagaaaagaattgtacttggtcccataccacgaaattgactggaacgaagccagaaatcaatgcgctaaggaggacttgtactatcctcatccattggttcaagacgttttgtgggcttccttgcaccacgtttacgaaccattattcatgagatggccagctaaacgtttacgtgaaaaggccttaagaaccgtcatgcaacacattcattacgaagatgaaaacaccagatatatctgtattggtcctgttaataaggttttgaacatgttgtgttgttgggttgaagacccacactctgaggcttttaagttacatataccacgtatttatgattacttatggttggcagaagatggtatgaagatgcaagggtacaatggttctcaattgtgggacactgccttcgcagtccaggctattatgtccacaaagttggttgaagaatatggtactactttgagaaaggcccacaaatacattaaagattcacaagtcttggaagattgtccaggtgacttgcaatcttggtacagacatatatccaagggtgcttggccattttctaccgctgatcatggttggcctatctccgattgtactgccgaaggtttgaaggctgttgtcttgttgtctaagttaccttccgagattgtcggtaaaccagttgacgaagagagaatgtacgacgccgttaacgttatcttatctttacagaacacagacggtggttttgctacctatgaattaaccagatcctatagatggttggaattgatgaacccagctgaaaccttcggtgatatagttatcgattacccatatgtcgaatgcacttccgcagcaattcaagctttagctgctttccgtaagttgtatccaggtcacagatctaatgagatcggtaactgcattgctaaagccgcagatttcatagaatctattcaagctactgacggttcttggtacggttcttggggtgtttgttttacctatggtggttggtttggtatcaaaggtttggttgccgctggtcgtagatacgaaaattcttcttcattgagaaaggcttgtgattacttattgtccaaggaattgccagccggtggttggggtgagtcatacttgtcatgtcaagacaaagtctacaccaatattaaggatgatagaccacacttagttaacaccgcttgggctatgttatcattgatcgacgcaggtcaagctgaaagagacccaactccattgcatagagccgccagaattttaatcaactcccagatggaagatggggatttccctcaagaagacatcatgggtgtctttaataaaaattgcatgatatcttattctgcttacagaaacatcttccctatttgggcattgggtgcttatcgttgtcgtgttttgttggcttcttaa

SEQ ID NO: 198 - DNA, 2298 bp, Artificial Sequence
  Synthetic
atgggtgaaatgtggaaattgaagttttctaagggttgggagacctcagaaaacgatcacgttgggcgtcaatattgggaatttgacactaatttaactccttccgaagaagaaaaggcacagatacaaaaattctacaacgaattttacaactatagattccaagccaagcattcttccgatttgttaatgagattccaattgagaaaggagaataacggtggtgaagtcaaattgccaacacaaatcaagattaccggtgaagaagagattaacgaagaagctatcgaaaagaccttaagacgtggtattagattctactctacattgcaaactcaagacggtttttggccaggtgactacggtggtccattgttcttgttgccagctttagttattggtttgtctgtcactaaggctttggatactgctatatcagttcaccatagacacgaaatgtgtagatacttatataatcatcagaacgaagacggtggttggggtttgcacatcgaaggtaattccactatgttgtgcaccgcattgtcttatgtctctttaagattattgggtgagaagatggatggtcgtgatggtgttttgttaaaagccagaagatggattttagacagaggtggtgctacatccatcccttcctgggggaagacttggttgtctgtcttgggtgtttacgaatgggaaggtaacaatccattgccaccagagatctggttgttaccatactcattacctttgcacccaggtagaatgtggtgtcactcaagaatggtttatttgccaatgtcttacttgtatggtaaacgtttcgtcggtcctatttctccaataatcatttctttgagaagagaattgtacacctgttcctaccatacaatcgactggaacttatctcgtaacttatgtgctaaagaagatttgtacaccccacattctaagattcaaaatatattgtggaactccatccacaagtttggtgagccattgttaaagaaatggccattgtccaaggttagacaaaaagccttggatttcgtcattcaacatatccattacgaagacgaaaacacccactacttgtgtttaggtcctatttctaaggttttaaatatggtttgctgttgggctgaagatcctaactcagaagcattcagaagacatatcccacgtattaaagattatttgtggttggctgaagacggtatgaagatgcagggttataacggttctcagttgtgggacgtcgtctttgctgttcaagccatcttagctactgatttagttgacgagtacggttctgttttgaagaaggcccacaacttcataaagaactctcaaatgaagagaaatgggattaaagaccaaaacaacccatccgtttggtatagacacatgtctaaaggtggttggccattctcaactcctgataacgcttggccagtctccgactgcacagctgaagctttgaaggcagctatcttgttgtcacaaatgcctactaccatggttggtgaaccaattgatgtccacaatttgtacgatgctgtcaacttgattttgtcattgcaaaactccaatggtggttttgcatcctacgaattgaccagatcctatccatggttggaaatgttaaacccagccgaaatatttggtgatgttatgatagactaccaatacgttgaatgtacttctgctgccattcaaggtttgaaagctttcatgaagttacacccaggttatcgtaagaaagacattcaaacttgtatctctaaggctgctcacttcattgaaactatccagttgccagatggttcctggtacggttcctggggtatctgctacacttacggtacctggtttggtattaagggtttggttgcctgtggtagaacctacgctaactctaaatgtatccgtaaggccacacaatttttgttgtctaaacaattgaagtcaggtggttggggtgaatcatacttgtctgctcatcacaaggtctatgcagatttaaaagacggtaagtctcacattgtcaatacctcttgggcattattagctttgattcaagccgaccaagctcaaagagatccatctcctttgcatagagctgccactgttttaattaattcacaaatggatgatggtgacttcccacaacaagaaatcatgggtgtttttaataagtcttgtatgatttcctatgctgcatacagaaatatcttcccaatctgggctttaggtgaatacagaatcagagttttacaattgcctgagaactaa

SEQ ID NO: 199 - DNA, 2301 bp, Artificial Sequence
  Synthetic
atgtggagattaaagattggtgccgacactgtaccatccgatcccagcaacgctgggggttggctgtcgaccctatcaaatcatcttggaaggcaggtgtgggagttttgcgctgaattgggttctccggaagatttgcaacaaatccaacaagcacgtcaaagattctctgaccacagattcgaaaaaaagcactccgctgacctcttgatgcggatgcaatttgccaaggaaaactctagtttcgtcaacttgcctcaggttaaagttaaggataaggaagaagtctctgaagaagctgtcacaagaactttgcgaagagcaattaatttctattccacgatacaagctgatgacggcaactgggcctcggatttaggtggtccaatgtttttgttaccaggtttggttatcgctctctacgttaccggcgttttaaattccgtgcttagtactgagcatcaaagagagatttgtagatacttgtacaaccaccaaaaccgtgatggtggttggggattgcacatcgaaggtccatctaccatgttcggttctgtgttgaactatgtcactcttagactactgggtgaagaagccgaagacggtcaaggtgctgttgacaaggctagaaaatggatattggatcatggtggggccgcggcgattacatcatggggtaagatgtggctatccgttctgggtgtctatgagtgggctggcaataatccattgcctccagaattgtggttattaccttacctcttgccatgtcacccaggtagaatgtggtgtcactgtagaatggtttacttgccaatgtgctacttgtatgggaaacgttttgtcggtccaatcaccccaattatccggtctttgagaaaggaactctacttggttccctaccatgaagttgattggaataaggcaagaaaccagtgtgctaaggaagatttatattacccacatcctctagtacaagacatcttgtgggcttctttacatcacgtctatgaacctttgttcatgcactggccagctaaaagacttagagaaaaggctttacaatcggttatgcaacacattcattacgaagatgaaaacagcaggtatatatgtctgggtccagtaaacaaagttttaaatatgttgtgctgttgggccgaagacccacattccgaagctttcaagttgcacattccgagaatttacgactacctatggatcgctgaggacggtatgagaatgcagggttacaacggttctcaattatgggacactgcgtttagcgtccaagctattatcagtacagaattggccgaagagtatgaaactacccttagaaaggcccataagtacataaaagattcacaagtcctagaggattgtccaggagatccaaacgtttggttcaggcacattcacaagggtgcatggcctttctctacaagagaccacggttggttaatttccgactgtaccgctgaaggtttgaaggcttctctcatgttatccaaattgccttcgaagatcgtaggagaaccactagaaaagcaacaactgtacaatgctgttaacgtgttgttatccttgcagaacgagaacggtggcttcgcatcttacgaactaactcgttcttacccatggttagaactaattaatcccgctgaaacgtttggtgacatcgtgattgattatccgtacgtcgaatgctcctctgctgcaatccaagctttggccgcctttaaaaaattgtacccagggcatagaagagacgaaatcaacaattgtattgccaaggctgctgatttcatcgaatctattcaggctactgatggtagttggtatggttcctggggtgtctgtttcacgtacgccggatggtttggtattaagggtctagtcgcggccggtcgcacttacaacaactgctcttcattacggaaggcttgtgatttcttgctaagtaaggagttggctgctggtggttggggtgaaagctatctctcttgtcaaaataaggtttacaccaacattaaggatgaccgcccacacatagttaatactggttgggctatgttgtcacttatagacgcagggcaatccgagagagatccaacccctttgcacagagctgcaagagttttgataaattcccaaatggaagatggtgattttccacaagaagaaatcatgggtgtttttaacaaaaactgtatgatcacatatgctgcctacagaaacattttcccaatatgggctttgggggaatacagatccagagttttaaaattattaaagtaa

SEQ ID NO: 200 - DNA, 2289 bp, Artificial Sequence
  Synthetic
atgtggcgtttgaagatcgctgacggtggcaacgatccttatatttactccacaaatgattttataggtagacagacttgggaatttgacccagaggccggtaccccagaagaaagacaagaagttgaagaagcaagacaccatttctacagaaaccgttataaagtcaagccatctgctgattgtttatggagaatgcaattcttgagagaaaagaaattcaagcaagagatcggtgctgtcaaaattaaggaaggtgaagaaatttctcaagacaaggccagaatcgctttacgtagagccgttcacttctactcagctttgcaagcttctgatggtcattggccagcagaaaatgctggtccattgttttttttacctccattggttatgtgcttgtacataactggtcacttagaccaagttttccctgaagaacataagaaagaaattttgagatacatctattgtcaccagaacgaggatggtggttggggtttgcatattgagggtcattccaccatgttctgtactgccttgtcctacatttgtatgagaatcttgggtgaaggtccagacggtggtttaaacaatgcttgtgctagaggtagaaagtggattttagatcacggttctgtcacctacatcccatcttggggtaagacctggttgtccattttgggtgtttacgactgggctggctcaaacccaatgccacctgaattttggttattgccatctttcttgccaatgcacccagccaagatgtggtgctattgtcgtatggtctatatgcctatgtcctacttgtatggtaaaagatttgtttgtcaaatcactcctttaattcaagaattgagattggagttacatgctcaaccattcgatgaaataaactggaagaaaactagacacttatgtacaaaagaagatgtttattacccacacccattgatgcaagatttgttgtgggactcattatacatttgtactgaacctttgttaaccagatggccattcaataagttggtcagagagaaggctttgcaagttacaatgaaacacatccattatgaagacgataactctcgttacatcaccatcggttgcgtcgaaaaggttttgtgcatgttagcatgttgggtcgaagatccagatggtgactacttcaagaaacacttggcacgtattcctgactacatttgggttgccgaggacggtatgaaaatgcagtcctttggttctcaagaatgggacactggtttcgctatccaagctttattggcagctgatatggctgacgaaataggtccagttttggctagaggtcatgattttattaagaagtctcaggtcaaggataatccatctggtaacttcaagaccatgcacagacatatatcaaaaggttcttggactttctccgaccaagatcacggttggcaagtctccgactgtaccgccgaagccttgaagtgctgtttgttgttctcattaatgagaccagaaattgtcggtgacaagatggaagctcaaagattgtatgactctgttaacgttttgttgtctttgcaatctaaaaatggtggtttggcagcttgggagcctgctactggtcaaaagtggttggaaatgttaaacccaacagaattttttgctgacattgttatcgaacacgagtacgtcgagtgtaccgcctcagctatccaagctttgatcttgttcaagaagttacatccaggccatagaactaaggaaattgataactttattcaaaatgctgtcagatacttgcaggatatccaaatgccagatggttcttggtacggtaactggggtgtttgtttcacctatggttgctggtttgccttaggtggtttagttgccgcagctaagacattcaataactgtgccgctataagaaaaggtgttcatttcttgttgaacattcaaatgccagatggtggttggggtgaatcctaccactgttgcccatctaagaagtatgtcccattggaaggtaagcgttcaaatttggttcacactgcctgggctatgatggccttgatccactctggtcaagctgaaagagatcctactccattgcatcgtgctgcaaagttattaattaattcccagacagaagatggtgatttccctcaacaagaaattaccggtgtttttatgaaaaactgtatgttgcactatgctgcatacagaaacatctacccattgtgggctttagctgaatactctaaaagagttaagttggcttcaacttctccataa

SEQ ID NO: 201 - DNA, 2289 bp, Artificial Sequence
  Synthetic
atgtggcgtttaaaagtcgcagacggtggcaacgatccatacatctattccatgaataactttgttggtagacaaatatgggaatttgaccctgatgctggttctccagacgagagagctgaagttgaaagagtcagaaatgaatttacaaagaaccgtttgaagggtttcccatcagccgatttgttatggagattgcagttgttaagagaaaaaaatttcaagcaatctattccacctgttaaggtcgaagacggtgaggaaattacctacgaaatggcctccgatgctatgaagagaggtgcttatttcttggaagcaatccaagcttctgatggtcactggccttccgagacttctggtccattgttctacttgtgtccattattgatttgcatgtacatcatgggtttcatggattcagctttttctccagaacataagaaagaaatgatgagatatttatacaaccaccaaaacgaagacggtggttggggtttgcatgttggtggtcactcaaacatgttctgtactaccttcaactacatttccttgagattgttaggtgaggaaccagatgttgaagccgtcgctaaaggtcgtatctggatcagagaccatggtggtgttacttctattttgtcctggggtaagacctggttgtctatattgaatttgttcgactggtctgcctctaatccaatgccacctgaatattggatgtttccaacatgggtccctattcacccatccaatatgatgtgttacactagaatcacctacatgccaatgtcatatttatatggtaagagatttcaagctccattgactccattagttttacaattgcgtgatgaattgcacactcaagcttacgaaaagattaactggagaaaggttagacacatgtgtgcaaccgaggacttgtacttcccacatccattcgttcaggacttattatgggatactttgtatatgttgtctgaacctttaatgacccgttggccatttaataaattgatcagacaaaaagctttggatgaaacaatgagacatattcattacgaggatgaaaactctcgttacataacaattggctgcgtcgaaaagccattgtgtatgttagcctgttgggtcgaagacccaaactctgaatatgttaaaaagcacttcgcaagaatacctgattacttgtggatggctgaagacggtatgaagatgcaatcctttggttcacaatcctgggatgccgctttggctatgcaggctttgttggcctgcaatatcactcacgatattggttcagctttgaacaacggtcacgaatttattaagaactctcaagttagaaataaccctccaggtgactacaagtccatgttcagatatatgtccaagggttcctggaccttctctgactgtgatcatggttggcaagtttcagactgtactgctgaaaatttaaaatgttgtttgttgttatccttgttgccacctgagatcgtcggtgaaaagatggagccacaaagattctacgatgctgttaacgtcatcttgaacatgcaatctaagaacggtggtttacctgcctgggaaccagcatcttcttactactggatggaatggttgaacccagtcgaatttttagaagatttgatcattgaacaccaacatgttgaatgtacctcttcagctttgcaggctattttattgttcagaaaacaataccctgagcacagaaagaaggaaatcaataacttcattaacaaggcagtccaatttttgcaggacatacaattgccagatggttcctggtatggtaactggggtatctgctacacctacggtacttggttcgctttgaaagctttgtcaatggcaggtaagacatatgagaactgtgaagctttgcgtaaaggtgccaattttttaattaagatccaaaacccagaaggtggtttcggtgaatcctatttatcttgtccatataaaagatacattccattagacggtaaaagatctaacttggttcaaactgcttggggtatgatgggcttaatcgccgctggtcaagctgatgttgatccaggtccaatacacagagcagccaagttattaatcaactcccaaactgaagatggtgacttccctcaagaagagattactggtgaattttttaagaactgcacattgcatttcgctgctttcagagaagtcttccctgtcatggctttgggtgaatactgtaataaggttccattgccatctaaaaaaaataccatcaattaa

SEQ ID NO: 202 - DNA, 2280 bp, Artificial Sequence
  Synthetic
atgtggcgtttaaaggttgcagatggtggcaatgacccttatatctactccatgtctaaccacttgggtagacaggtctgggaattttgtgctgacgctggttcaccagatgagagagccgaagttgaaagagtcagaaacgaatttactaaaaacagattgaagggtttcccatctgctgatttattgtggagattgcaattgttacgtgaaaaaaatttcaagcaatccattccaccagttaaggtcgaagacggtgaggaaataacatacgaaatggcctcagatgctatgaagagaggtgcttatttcttggaagcaattcaagcttctgatggtaactgggcctctgacttgggtggtcctatgttcttgttgccaggtttggttatcgctttatacgttaccggtgtcttgaactccgctttttctccagaacataagaaagaaatgatgagatacttatataatcaccaaaacgaggacggtggttggggtttgcatgttggtggtcactctaacatgttctgcactacctttaattacatttccttaagattgttgggtgaagaaccagatgtcgaagccgttgctaagggtagaatttggatccgtgatcatggtggtgttacttcaatcttgtcttggggcaaaacatggttgtctatattaaacttgttcgactggtccgcctcaaacccaatgccacctgaatattggatgttccctacctgggtcccaattcacccatctaatatgatgtgttacaccagaatcacttacatgccaatgtcctacttatatggcaagcgttttcaagctccattgactcctttagttttgcaattaagagacgaattacacacccaggcctacgagaagattaattggagaaaggttagacatatgtgtgctactgaggatttgtatttccctcacccattcgttcaagacttgttgtgggatacattgtacatgttatctgaaccattgatgactagatggccatttaacaaattgatcagacaaaaggctttggacgaaaccatgagacacattcattacgaagatgaaaactctcgttatatttgtttgggtccagtcgaaaaaccattgtgcatgttggcatgttgggtcgaggatccaaattccgaatacgtcaagaagcatttcgctcgtataccagactacttatggatggccgaagacggtatgagaatgcaaggttacaacggttctcagttgtgggatacagctttctcccaagcattattggcttgtaacataactcacgatatcggttcagctttgaataatggtcacgaatttattaaaaattcacaagttagaaacaaccctccaggtgatccaaacgtttggttcagacatatccacaaaggtgcttggccattctctactagagatcacggttggttgatctctgactgtaccgccgaaggcttaaaggcctccttgatgttgtccaagttgccttctaagattgttggtgagccattagaaaagtacgacgccgttaacgttttgttatcattacaaaatgaaaacggtggttttgcttcctatgaattgactcgttcctacccatggttggagttaatcaacccagctgaaacattcggtgatatcgtcattgactaccaacatgtcgaatgcacctcctctgctttgcaggcaatattattatttagaaagcaatatcctgaacacagaaagaaagagatcaataactttattaataaggccgttcaatttttacaagacattcaattgcctgatggttcttggtacggtaactggggtatttgttacacttatgctggttggttcggtattaagggtttggtcgctgctggtagaacctacaacaactgtgaagcattgagaaaaggtgccaatttcttgattaagatacaaaacccagaaggtggttttggtgaatcttatttgtcttgtccatataagagatacatccctttagacggtaagagatcaaacttggtccaaaccgcttggggtatgatgggtttgattgctgctggtcaagcagatgttgatccaggtcctatacatagagctgctaaattattaatcaattctcaaactgaagacggtgatttcccacaagaagaaatcatgggtgtcttcaacaagaactgcatgattacctacgcagctttcagagaagtttttccagttatggctttgggcgagtattgtaataaagttccattgccatctaagaagaacactattaattaa

SEQ ID NO: 203 - DNA, 2358 bp, Artificial Sequence
  Synthetic
atgtggcgtttaaaagtcggtaaggaatccgttggcgagaaggaagaaaagtggattaaatcaatatctaaccatttgggtagacaagtttgggaattttgtgcagagaatgacgatgatgacgacgatgaagctgtcatccacgttgtcgctaactcttccaagcacttgttacagcaacaaagaagacaatcttctttcgaaaatgccagaaaacaattcagaaacaatcgttttcatagaaagcaatcctctgatttgttcttgaccattcagtacgaaaaggaaatcgccagaaacggtgctaagaacggtggtaacactaaggttaaagaaggtgaagacgttaagaaggaggctgtcaataacacattggaaagagctttatcattctattcagcaattcaaacttctgatggtaattgggcttccgacttgggtggtcctatgtttttattgccaggtttggtcatcgccttatacgttaccggtgttttgaactctgtcttgtccaagcaccacagacaagaaatgtgccgttatatttacaatcatcaaaacgaggacggtggttggggtttacatatcgaaggttcatccaccatgttcggttctgctttgaactatgttgcattgagattattgggtgaagatgctaatggtggtgaatgtggtgccatgactaaggctagatcttggatcttggaaagaggcggtgccacagctattacttcatggggtaaattgtggttgtctgttttgggtgtctacgaatggtctggtaataacccattaccacctgaattttggttgttaccatactccttgccattccacccaggtcgtatgtggtgtcattgcagaatggtttacttgccaatgtcttatttgtacggtaaaagattcgttggtcctataacccacatggtcttgtctttaagaaaagaattgtacactataccataccatgaaattgactggaaccgttccagaaacacttgtgctcaggaggatttgtattacccacacccaaagatgcaagatatcttgtggggttccatttaccacgtctatgagcctttgtttaatggctggccaggtagaagattacgtgaaaaggccatgaagattgctatggaacacatccattacgaagacgagaactcaagatacatttgtttaggtcctgttaacaaggttttaaacatgttgtgttgttgggttgaagatccatactctgatgctttcaagtttcacttacaaagaatcccagattatttgtggttggctgaagatggtatgagaatgcaaggttacaatggttcccaattgtgggacactgctttttctatccaagcaattttatctaccaaattgatcgatacattcggttccaccttgagaaaagcccaccatttcgtcaagcactcacaaatccaagaagactgtccaggtgatccaaatgtttggtttagacatattcataagggtgcttggccattctccaccagagaccacggttggttaatatctgactgtaccgctgaaggtttaaaggcctctttgatgttgtctaagttgccatctaaaatagttggtgaaccattggagaagaacagattgtgcgacgcagttaacgtcttgttgtccttgcaaaatgaaaatggtggtttcgcttcctatgaattaactagatcttatccatggttggaattaattaacccagccgaaacttttggtgatatcgttattgactactcttacgtcgaatgtacatcagctactatggaggctttagctttatttaagaaattgcacccaggtcatagaaccaaagagattgacgctgccttggctaaggctgctaacttcttagaaaacatgcaaagaaccgatggttcttggtacggttgctggggtgtctgtttcacttatgctggttggtttggtattaagggtttggtcgccgctggtcgtacttataataattgtgttgcaattcgtaaagcatgtcacttcttgttgtctaaggaattgcctggtggtggttggggtgaatcctacttatcctgtcaaaacaaggtttatacaaacttggaaggtaatagacctcacttagttaataccgcctgggtcttgatggcattgatcgaagctggtcagggtgagcgtgatcctgccccattacatagagctgccagattgttgattaactcccaattggaaaacggtgattttccacagcaagaaattatgggcgtcttcaacaaaaactgtatgataacatacgccgcttacagaaacatatttccaatctgggctttaggtgaatattcacacagagtcttgactgaataa

SEQ ID NO: 204 - DNA, 2277 bp, Artificial Sequence
  Synthetic
atgtggaggttgaaggtagctgatggcggaaatgacccctacatagactcaacaaacaactttgtgggtcgtcaaatctgggagttcgatcctgattatggtactccggacgaacgcgccgaagtcgaagctgcaagagaaaacttctggaaaaatagatttcaggttaagttatctagtgaccttctatggagaatgcaattcgctagagaaaacccatgcgttaccaatttgccacaaattaaggtccaagatttggaggaagtgacggaagaagtcgtaaccactactctgaggagaggtttgaacttctactccaccattcaagcgcatgacggtcactggcctggtgattgtggtgggccaatgtttctattaccaggtttggttatcactttgtatgttactggtgccttacacgtcgttctttcgatcgagcaacagagagaaatgtgtagatacttgtgtaaccatcaaaacgaagatggtggttggggattgcacattgaaggcccatctaccatgtttggtacagttttgaattacgttaccctcagattattgggagaagctgacttcggtgctaaaggtgccatggaaaagggtcaaaagtggattctggatcatggcggtgctactgctattacgagctggggtaagatgtggttgtctgtcttaggtgcatatgaatggttcgggaccaacccattgcctccagaaatgtggttatgtccatacatccttccagttcacccgggtagaatgtggtgccattgtcgtatggtgtatttgcccatgtcctacttatacggtaaaaagttcgtcggcccaataaccagcactattatctcgcttcgtaaggaattgtacatcgttccatatcacgaagttgactggaatcaagctagaaatcagtgtgccaaagaggacttatattacccacacccattggtccaagatattttgtgggctagtttacataaggttttggagcctattcttggtcactggccaggtaacaatctaagagaaaaggccttatgtactgtgatgcaacacgttcattacgaagacgaaaacactagatacatttgcttgggccctgtcaacaaagtactaaacatgttgtgttgttggatcgaagatccaaactccgaagcttttaagttgcacataccaagaatcttcgattacctgtggatagctgaagatggtatgaaaatgcaaggttactctggttcacaattatgggacacgtcctttgctgttcaagctatcatttctactaatctaggtgaagaatatggtttgaccttgcgcaaggcacacgaatttattaagaactctcaggtcctggaggattgccctggtgacttgaagttctggtacagacacatctctaaaggggcatggccattctccacagccgaccaaggttggcctatctctgactgtacggctgagggcttgaaagccgtattattgctgagtaagcttccagttgaaaccgtcggggaaccattggatatgaagcatttgtcagatgctgttaatgtcattctatccttgcaaaatgcggatggtggtttcgctacttacgagcttactagatcttatcgttgggttgaactcattaaccctgccgaaacattcggcgacatagttatcgattacccatacgtggaatgtacctcggctgctatacaagccctcacttctttcaagaagctatatccggaacatagaagacatgaaattgaaaactgcatttctaaagctgcgaaatttattgaagaaatccaggctccagacggatcttggtatggttgttggggtgtctgttttacctatggtggttggttcggtatcaccggtttgattgctgccggtaatacatactccaattgtccatgtatcagaaaggcgtgtgattacttgttgagcaaggaattagcctcaggtggttggggtgaatcatacttatcctgtcaaaacaaggtctacacaaacctccctggagataagccacatatagttaacactgcttgggctatgctagctttgattgaagcaggacaagctggtcgtgacccgaatccattacacagagcagctcgaatcttgatcaatagtcaaatgaagaacggcgattttccccaagaagaaatcatgggagtgtttaacaaaaactgcatgattaactactctgcctatcgaaatatatttccaatctgggctctaggtgagcacagaagtagggtcttgcattcgtcctaa

SEQ ID NO: 205 - DNA, 2361 bp, Artificial Sequence
  Synthetic
atgggtaatatcaaggaacgtaaaggaaaggatagagagagacaaagagaaatgtggaagttaaaaataggtggtgaatccgtcggtaagaacaacgaagaaaaatggttgaagtcaatttctaatcacttgggtagacaggtttgggaattttgcccaaagttagaaaccgagactgaaacagagactgaatctcaaattgaaaacgcccgtaacaccttccatttgaacagattccacaaaaagcaatcctctgacttgtttatcactttgcaatatggtaatgaaattgctaaaatcgaaggtgttaagattaaggaaaaggaagaagtcagagaggaagctgttaaaactacattggagagagcattaaatttctactccgccatccaaacctcagacggtcattgggcttctgatttgggtggtcctatgttcttgttaccaggtttggttattactttgtacgtcaccggtgttttaaactccgtcttgtctaagcaccatagacaggaaatatgtagatatttgtacaaccaccaaaatgaagatggtggttggggtttacatatcgaaggtccatctactatgtttggttctgttttgaactacgtcgctttacgtttgttggctcaagactccgagtacgattccattttgaaaggtagaagatggatcttggaccacggtggtgcaacaggtattacctcatggggtaagttatggttgtccgttttaggtgtttatgaatggtgtggtaacaatccattgccacctgaattttggatcttgccatacttcttgccattccaccctggaagaatgtggtgtcactgccgtatggtttatttgccaatgtcttacttgtacggtaagagattcgtcggtccaattacccctactgtcttatctttgagaaaggaattatatacagtcccatatcatgaaattgactggaacaaatcccgtaatacttgtgctaaggaggatttatactacccacatcctaaaatacaagacatcttgtgggcttctttacatcacgtttacgaaccattctttaccagatggccaggtaagagattgagagataaggccttgcacgccgctatgcaacacatccattatgaagatgaaaatactagatatatttgtttgggtccagttaacaaagttttgaacatgttgtgttgttgggtcgaagaccctcactcagacgcttttaagtttcatttgcaacgtgtttacgattacttatgggttgctgaagatggtatgaagatgcaaggttacaatggttcacaattgtgggatactgctttctctgtccaagcaatcatctctaccaagttgactgaaaacttcggtccaacattaagaaaggcccataatttcattaagttgtcccagattcaacaagactgtccaggtgatccaaacatttggtatagacacatccataagggtgcttggcctttctctactgctgatcacggttggttaatttctgattgcaccgccgagggtttaaaggcatctttattattgtccaaagtctcttccaacacagttggtgaaccattggaacgtaacagattatttgacgctgtcaacgttttgttgtctttgcaaaacaagaatggtggtatagcctcatacgagttgactagatcttatccatggttagaattgatcaatcctgctgaaacctttggtgacattgttatcgactacccatatgttgaatgcacttctgctaccattgaagcattggctttgttcaaaaagttgtacccaggtcacagaaccaaggaaattgacaacgtcatagctaaggccgctaaattcttagaagatatgcaaagagaagatggttcttggtacggttgttggggagtttgttttacatacgcaggttggttcggtatcaagggtttggttgctgctggtagacaatataataattccccaaccattcgtaaggcatgtaacttcatattgtccaaagagttgccaggtggtgttggtggttggggtgagtcatacttgtcatgccagaacaaagtctacaccaatttggatggtaacagaccacatttggttaacacatcctgggctttgatggctttgatcgaagctggtcaggccgaccgtgacccaacccctttacatagagctgccagattgttgatcaactcccaattggaaaacggtgactttccacaacaagaaattatgggtgtcttcaacaagaattgtatgatcacttacgccgcttacagaaacatttttccaatctgggccttaggtgaatactgtcacagagtcttgaaccagcacagatcttctccattgttttaa

SEQ ID NO: 206 - DNA, 2310 bp, Artificial Sequence
  Synthetic
atgtggaagctaaaaattggtggcgaatctgttggtaagaacaatgaggaaaaatggcttaagtcgataagcaaccatctgggtcgacaggtgtgggaattttgtcctaagttagaaacagaaaccgaaactgagacggaatcccaaatcgaaaatgcccgtaacaccttccacctcaacagattccacaagaaacaatcatccgacttgttcatcacattgcaatacggaaatgagattgctaagattgaaggtgtcaaaatcaaggaaaaggaagaagtaagggaagaagcagttaagactactttggaaagagctttaaacttttatagtgctatacaaacttctgatggtcattgggcctctgatttagggggtcccatgttcttgttgccaggtttggtcattaccctgtacgttaccggtgttttaaatagtgtcttgtctaaacaccacagacaagaaatctgccgctacttgtataaccatcaaaatgaggacggcggttggggtttgcacattgaaggtccatccactatgtttgggtctgttctcaactacgtggctcttagattgttagctcaggactccgaatatgattcgattctaaagggtcggagatggatccttgatcacggtggtgcaacaggcatcacttcttggggaaagttatggttgtcagttttgggtgtctacgaatggtgtgggaacaacccactacctccagaattttggatcttaccatatttcttgcccttccatccaggtcggatgtggtgtcattgccgtatggtttacctgccaatgtcctacttgtacggtaaaagattcgtaggtccaattactcctaccgtcctatctttgagaaaggaactctatacggtgccataccacgagattgactggaataagtcaagaaacacctgtgccaaagaggacctgtactatccacacccgaagattcaagatattttgtgggcttccctgcatcatgtttacgaaccattttttaccagatggcctggtaaaagattgcgtgacaaggctcttcacgccgctatgcaacatatccactacgaagatgagaatactagatatatatgtttgggtccagtcaacaaagttctaaacatgttgtgttgttgggttgaagatccccattcggatgcgttcaagttccacttacaaagagtctacgactatctgtgggtcgctgaagacggtatgaagatgcaaggttataatggaagccaattgtgggacaccgcatttagtgtacaggctataatttctaccaagctcactgaaaattttggcccgactttaagaaaggcgcacaacttcatcaagttgtcacaaattcaacaagattgtccaggtgatccaaatatttggtacagacatatccacaagggtgcctggccgttctctaccgctgatcacggttggcttatctccgattgcacggctgaaggtttgaaagcttctctattgttgtctaaagtttcgtctaacacagttggggaacctttagagagaaaccgcttatttgacgctgtcaatgttttgttgtccttgcaaaacaagaacggtggaatagcttcctacgaattgactagaagctacccatggcttgaattgatcaatccagccgaaacattcggtgacattgtcattgattacccatacgttgaatgtacctcagctactatagaagctttggcccttttcaagaagttgtatcctggtcaccgaactaaggagattgacaatgtcatcgcgaaggccgctaaattcttggaagatatgcaaagagaagacggttcatggtacggatgctggggtgtgtgttttacgtatgcaggttggtttggtattaagggtttagttgctgccggtagacagtataacaactctccaactataagaaaggcttgtaatttcatcttaagtaaagagttgccaggtggtgtcggcggttggggtgaatcttatctgtcttgtcaaaacaaggtatacaccaacctagacggtaaccgtccacatttagtcaacaccagttgggctttgatggccctaattgaagctgggcaggctgaccgagaccccactccactccacagagcggcaagactgttgatcaatagtcaattagaaaatggtgatttcccacaacaagagattatgggtgttttcaacaagaactgcatgattacttacgctgcttacagaaatatcttccccatttgggcgcttggcgaatactgtcatagagttttaaaccaacaccgctcctctccactcttctaa

SEQ ID NO: 207 - DNA, 2280 bp, Artificial Sequence
  Synthetic
atgtggcgtttaaaggttggtgccgaatctgtcggagagaacgatgaaaaatggttgaagtcaatttccaatcatttgggtagacaagtttgggaattttgccctgacgctggtactcagcaacaattgttacaagtccacaaggctagaaaagcattccacgatgacagattccatagaaagcaatcctctgacttgtttatcaccatacaatacggtaaagaagttgaaaacggtggtaagacagctggtgtcaagttgaaagaaggtgaagaggttcgtaaggaagccgttgagtcttctttagaaagagcattgtccttctattcctcaatccaaacttcagatggtaactgggcttctgatttgggtggtccaatgttcttgttgccaggtttggttattgctttatacgtcactggtgtcttaaattccgttttgtctaaacaccatagacaagagatgtgtagatatgtttacaaccaccaaaatgaagacggtggttggggtttgcacattgaaggtccatctaccatgtttggttcagccttaaactacgttgctttgagattgttgggtgaagatgctaacgctggtgcaatgccaaaggctcgtgcctggatcttggaccatggaggtgctactggtataacctcttggggtaagttatggttatccgtcttgggtgtctatgaatggtctggtaataaccctttgccaccagaattttggttattcccatacttcttaccattccacccaggtagaatgtggtgtcattgtagaatggtctatttgcctatgtcttacttgtacggtaagagatttgttggtccaatcacacctattgttttatctttgagaaaggaattatacgccgtcccatatcacgaaattgattggaataaatcaagaaacacctgtgctaaggaggacttgtactaccctcatccaaaaatgcaggatattttgtggggttccttgcaccatgtttatgaaccattattcactcgttggcctgctaagagattgcgtgaaaaggccttgcaaactgctatgcaacacatccactacgaagatgaaaacactagatacatctgtttgggtccagtcaataaggtcttgaacttgttatgctgttgggttgaagacccatactccgacgcttttaaattacacttgcaaagagttcatgattacttatgggttgctgaggatggtatgaagatgcagggttataacggttctcaattgtgggacaccgcattttcaatacaggctattgtctctactaagttagtcgataattatggtccaaccttgagaaaggctcatgacttcgttaagtcctcccaaatccaacaagattgtccaggtgacccaaacgtctggtacagacacattcataaaggtgcttggcctttctctactcgtgatcatggttggttaatctccgattgcaccgctgaaggtttgaaggcagccttgatgttgtccaagttaccatctgaaactgttggtgaatctttggaaagaaacagattgtgtgacgccgttaatgttttgttgtccttacaaaacgataatggtggatttgcctcttacgaattaacaagatcatacccatggttggagttgattaacccagctgaaacattcggtgatatcgtcattgattatccatacgtcgaatgcacctctgctaccatggaagctttgactttgtttaaaaagttgcacccaggtcatagaaccaaggaaattgacactgctattgttagagcagctaacttcttggaaaacatgcaacgtactgacggttcttggtacggttgttggggtgtttgttttacatacgccggttggttcggtatcaagggtttggttgccgcaggtagaacctacaacaattgtttggctataagaaaagcttgtgacttcttgttatccaaggaattgccaggtggtggttggggtgaatcatacttgtcctgtcaaaataaggtttatactaatttggaaggtaacagacctcacttggttaataccgcctgggtcttaatggctttgatagaagctggtcaagctgaaagagacccaactcctttacaccgtgctgcaagattgttgatcaactcacagttagaaaatggtgattttcctcaacaagagataatgggtgttttcaacaagaattgcatgattacctatgccgcttatcgtaacatcttcccaatttgggcattaggtgagtactgtcatcgtgttttaacagagtaa

SEQ ID NO: 208 - DNA, 2298 bp, Artificial Sequence
  Synthetic
atgtggagattaaaagttggtgctgatacagtcccagccgacccttccaatgctggaggttggttgtcaactttgtctaaccacttgggtcgtcaagtttgggaattttgcgcagagttaggttctccagaagatttgcagcaaatccaacatgctagacaaagattctctgaccacagattcgaaaagaagcattccgccgatttgttaatgagaatgcaatttgctaaggaaaactcttcattcgtcaacttgccacagattaaagttaaggacaaagaagatgttatagaggaagctgttacccgtactttgagaagagcaattaatttttactccaccatccaagctgatgacggtaactgggcctctgatttgggtggtccaatgttcttattgccaggtttggtcattgctttatatgttactggtgtcttgaactctgttttgtccactgaacaccaacgtgaaatatgtagatacttatataatcatcagaacagagacggaggttggggtttgcacatcgagggtccttctaccatgttcggttcagtcttgaattacgttactttgagattattaggtgaagaagctgaagatggtcaaggtggtgttgacaaggccagaaagtggattttggatcacggtggtgctacagctattacctcctggggtaaaatgtggttatctgtcttgggtatctacgaatgggccggtaataacccattaccacctgaattgtggttgttgccatatttgttgccatgtcatcctggtagaatgtggtgtcactgtcgtatggtttacttaccaatgtgctacttgtatggtaaaagatttgtcggtccaattaccccaatcataagatcattaagaaaggagttgtacttggtcccatatcacgaagttgactggaacgaagccagaaatcaatgtgctaaggaagacttgtactacccacatccattagttcaagatgtcttatgggcttccttgcaccatgtttatgagccattgttcatgagatggcctgctaagagattgagagaaaaggctttgagatccgttatgcagcatatccactacgaagatgaaaactctcgttatatttgtttgggtccagtcaataaggtcttaaacatgttgtgttgctgggccgaagatcctcactctgaagcattcaagttgcatatcccaagaatctacgactacttgtggattgcagaagacggtatgcgtatgcaaggttataatggttcacaattgtgggacactgcattctctgttcaagctataatttctaccaagttggctgaagagtacggtactaccttaagaaaagctcacaaatatatcaaggattctcaagttttggaagattgtcctggtgacccaaacgtttggtttagacacattcataagggtgcttggccattttccacacgtgatcacggttggttgatctctgattgtactgccgaaggtttgaaggcctcattaatgttatctaagttgccatccaaaattgtcggtgaaccattagagaaggaaagaatatacgatgctgttaacgtcttgttatccttgcagaacgaaaacggtggtttcgcttcctacgaattaactagatcatatccatggttggaattaattaatccagccgaaacttttggtgacattgttattgactacccatatgtcgaatgtacctccgctgctatccaagccttggctgccttcaagaaattgtacccaggacacagatctaatgagataggtaactgtatcgctaaggccgcagatttcatcgaatctatccaagctactgatggttcttggtacggttcttggggtgtttgtttcacatacgctggttggtttggtattaagggtttggttgctgccggtagaacctataataactgttcatctttaagaaaagcatgcgacttcttattatcaaaggaattggccgctggtggttggggtgaatcctacttgtcttgccaagacaaagtctacactaatatcaaggatgaccgtcctcacattgttaacaccggttgggctactttgtccttgattgacgctggtcaagctgaaagagatccaacccctttgcaccgtgccgctagagttttaattaactctcaaatggacgatggtgactttccacaagaagagattatgggtgtcttcaacaagaattgcatgatcacttatgccgcttatagaaacatatttccaatatgggctttgggtgagtacagatgtcgtgttttacaagcaccataa

SEQ ID NO: 209 - DNA, 2277 bp, Artificial Sequence
  Synthetic
atgtggcgcttaaagattgcagagggtggaaacccgtggctgagaactaccaatgatcatgtcgggcgtcaagtttgggaatttgaccctgaattgggttcaccagaagaattgtctgctatagaattggctcggagagatttcacgaaaaacagattcgaacacaagcacagcgccgacctattaatgaggatccagttttccaaggagaatccattggaaagagtgcttccccaagtaaaattgaaggaaaaagaagatgttacaaaggaagctgttaagagtaccctagaaagagcgctttctttctactccgctgtccaaacttcggacggcaactgggcctctgacttaggtggtccaatgttcctcttgccaggtttggtcattgcactatctgttactggtgctatgaacgctgttctttccgaacaacataagtccgagatgagaagatatttatacaatcaccaaaacgaggatggtgggtggggcttgcatatcgaaggtcctagtacaatgtttggttcagtattgtcttatgtcaccctgagattgttgggtgaaggtgctaatgatggtgaaggtgccatggaaaaaggtagagattggattgtcaatcacggtggagccaccgctatcacttcttggggtaagatgtggttaagcgttttgggtgtctttgaatggagtgggaacaacccattgccaccagagatttggttgctgccttacatgttaccaatccatccgggtcgtatgtggtgccactgtagaatggtttacttgcctatgtcttatctatacggcaaaagattcgtcggtccaataactccaactgttttgtctttacgaaaggaattgttctccacgccctatcacgaaattgactggaatagagcgagaaacgaatgtgcaaaggaggacttatactacccacatccattgattcaagacttgctttggggttctctacacaactttgtggaacctatcctcatggcttggcctggaaagaagctaagagaaaaagcattgcgcaccaccctggaacacatccactatgaagatgaaaatactcgttacatttgtttgggtccagtgaacaaggttttgaacttgttgtgctgttgggtagaagacccatacagcgatgctttcaaattgcatttacaaagagtccacgattatttgtgggttgctgaggatggcatgaagatgcagggttacaacggttcgcaattgtgggacactgccttctccatccaagctatcctgtctacaaacttaattgaagaatacgcttcgacccttaaaaaggctcatgcctttgttaaagactcacagatacaagaagattgtccaggtgatccaaacgtttggttcagacatattcacaagggtgcttggccattctccaccagagaccacggttggcttatctctgattgtactgccgagggtcttaaggcttcgttgatgttatctaagctgccctcaacgatggtgggcgaaccactagaagctaataggttgtgtgacgccgtcaatgttcttctgtcattacaaaatgacaacggtggttttgcttcctacgaattgactcgttcctacccatggctcgaacttataaatcctgctgaaacattcggtgacattgttattgattacccatatgttgaatgcacatccgctaccatggaagcactgactctcttcaagaagttacaccccggtcatagaactaaagagattgacacctgtatcaagaaagccgtcgcgtttttggaaaaaatgcaaagagcggatggttcatggtatggttgttggggtgtttgttttacttacgctggttggtttggaatcaaggggttggttgctgctgggcggacctacaactcttgtttggccataagaaaggcttgcgagttcctcttgtcaaaggaattaccaggtggtggttggggtgaatcttatttgtcttgtcaaaataaagtctacactaacttggaaggtaacaagccacatttggtaaacaccgcctgggtcttgatggctttgattgaagccggacaagccgaaagagatccagctccactgcacagagctgctaggtttttaattaactctcaaatggaaaatggtgacttccctcagcaagagatcatgggggtgtttaacaggaattgcatgatcacgtattcggcttatagagatatcttccctatttgggccttgggtgaataccgcacgaaggttttgcatgccagcagctaa

SEQ ID NO: 210 - DNA, 2280 bp, Artificial Sequence
  Synthetic
atgtggcgtttaaaaatctcggagggaggcaatccttggttgaggacgacaaacaaccacgtcggtagacaggtgtgggaatttgacccagaactaggtagtccagaagaactctctgccattgaattggcacgaagagatttcaccaagaatagattcgaacaaaagcattcagcggaccttctgatgagaatacaattttctaaggagaaccccttggaaagagttttgccacaagtaaaattgagagaaaaggaagatgttactaaggaagctgtcaaaagcaccttagagagagctttgtccttctactctgctgttcaaacttccgatggtaattgggctagcgacttaggtggtccaatgtttctactgccaggtctagttatcgccttgtctgtcaccggtgctatgaacgctgttttatcagaacaacacaagtctgaaatgtgccgctatctttacaaccatcaaaacgaagatgggggttggggcttgcacattgaaggtccttccactatgttcggttcggttttgtcttatgtcactcttagattgttgggtgaaggaccgaacgacggtgaaggtgctatggggaagggacgggattggattttaaatcatggtggggctacagcaatcacctcctggggtaaattgtggttgagcgtcttgggtgtgttcgagtggtctggaaataacccactcccacccgaaatctggttattaccttacatgctaccaattcacccaggtaggatgtggtgtcactgtagaatggtttacctgccaatgtcctatttgtacggtaagagatttgttggtccgataactccaacagttttgtctttgagaaaggaattgttctccactccatatcacgagatcgattggaatagagcgcgtaacgaatgtgccaaggaagacttatactacccacatcctttaattcaggacttattgtggggttcattgcacaacttcgtagagccaattttgatggcatggccgggtaaaaaattgagagaaaaggctctgcggaccaccctagaacatattcattacgaagacgaaaacacaagatatatatgcctgggtccagtcaataaggtcttgaaccttttgtgttgttgggttgaagatccttacagtgacgcctttaagttacacttacaacgtgtacacgattacttgtgggtcgctgaagacggtatgaagatgcaaggctacaatggttctcaactctgggatactgctttctccatccaagctattttgtcaactaacctcgtagaagaatacgcctccacattgaaaaaggctcacacctatgttaaagacagccaaatccaggaagattgtccaggcgatcctaatgtttggtttagacatatacataagggtgcctggccattctctactagagaccatggttggttgatttcagattgtacagcagaaggcttaaaggcttcactaatgctttctaagttgccatctactatggtcggggaaccattggaagctaaccggctctgcgacgctgttaatgtcttgctatcgttacaaaacgacaacggtggtttcgctagctatgagttgaccagatcttacccatggttggaactgatcaatcctgcggagacatttggcgatatagttattgactacccgtatgtcgaatgtaccagtgccactatggaagctcttactttatttaaaaagttgcaccctggtcaccgtacgaaggaaatcgatacctgcattaaaaaagctgtcgccttccttgaaaagatgcaaagagctgatggttcttggtatggttgttggggtgtttgtttcacttacgcaggatggttcggtatcaagggtttagtcgcggctggtagaacgtataattcctgtttggctatcaggaaggcgtgcgaatttttgctaagtaaagaattgcccggtgggggctggggtgaatcttaccttagttgtcaaaacaaggtatacaccaacctagaaggtaacaagccacatcttgttaacactgcttgggtgttaatggctttgattgaggctgggcaagccgagagagatccggccccattgcacagagcagctagattcttgattaactcccagatggaaaacggtgattttccacaacaagacatcatgggtgtttttaatcgcaactgtatgataacctatgctgcttacagggacattttcccaatttgggctttgggtgaataccgtactaaggttttgcacgcaagcccttcctaa

SEQ ID NO: 211 - DNA, 2289 bp, Artificial Sequence
  Synthetic
atgtggagattaaaagttggtgcagagtccgtcggggaaaacgacgaaaagtgggttaagtctatatcaaatcatttgggtcgtcaggtctgggaattttgcccagatgctggtacccctcaacaattgttgcaaattgaaaaggccagaaaagctttccaagacaacagattccacagaaagcaaacttctgatttattggtttctatccagtgtgaaaaaggtactacaaacggtgctagagtcccaggtaccaagttgaaggagggtgaagaagttcgtaaggaagccgttaagtccactttggaaagagctttatccttttattcttcaatccaaacatctgacggtaattgggcttctgatttgggtggtccaatgttcttattgccaggtttggttattgccttatgtgtcaccggtgctttgaactccgtcttgtccaaacaccatagacaagagatgtgtagatacttgtacaatcaccaaaacgaagacggtggttggggtttacatattgaatccccatctactatgtttggttccgcattgaactacgttgctttgagattattgggtgaagatgccgatggtggtgaaggtcgtgctatgaccaaagctagagcctggatcttggggcacggtggtgctaccgccatcacttcttggggtaagttatggttatcagtcttgggtgtctatgaatggtctggtaataatcctttaccacctgaattttggttgttgccatacttcttgccattccaccctggtagaatgtggtgtcattgcagaatggtttatttaccaatgtcctacttgtacggtaagcgtttcgttggtccaataactccagtcgttttgtctttgagaaaggaattgtatactgttccttaccacgagattgactggaacaagtcaagaaacacctgtgctaaagaagatttatattacccacattctaagatgcaagatattttgtggggttctattcaccatatgtacgagccattgtttacccactggcctgctaaaagattgagagaaaaggctttgaagacagcaatgcagcacatccattacgaagacgaaaatactagatatatctgtttgggtccagttaacaaggtcttaaatatgttgtgttgctgggttgaagacccatattctgaagccttcaagttgcacttacaaagagtccacgattacttgtgggttgctgaagacggtatgaaaatgcaaggttacaacggttcacaattgtgggacaccgcattctccgttcaagctattatctctactaagttagtcgataactacggtccaactttgcgtaaggctcatgactatgtcaaaaactctcaaatccaacaagattgtccaggtgaaccaaacgtctggttcagacacattcacaagggtgcttggccattctccaccagagatcacggttggttgatttctgattgcacagctgaaggtttaaaagcatctttgatgttatccaagttgccttccgagacagttggggaacctttagaaagaaatcgtttatgtgatgccgttaatgttttgttgtccttgcagaacgacaatggtggttttgcatcatatgaattgactagatcttacccttggttggagttgattaacccagctgagacttttggtgacatcgttattgattacccatatgttgaatgtacttctgccaccatggaagctttagctttgttcaagaaattgcatccaggtcaccgtaccaaagaaatcgacacagcaatcgctcgtgctgctgattttttggagaacatgcaaagaactgacgggtcttggtacggttgttggggtgtctgtttcacttacgctggttggttcggtattaagggtttggtcgctgccggtagagcatattccaactgtttggctattagaaaagcctgtgatttcttattgtcaaaggaattgccaggtggtggttggggtgaatcttacttgtcctgtcagaacaaggtttatactaacttagaaggtaatagaccacacttggttaataccgcctgggttttaatggctttgatagaggctggtcaaggtgaaagagatcctgccccattgcacagagcagctcgtttattgatcaactctcaattggaaaacggtgattttccacaagaagaaatcatgggtgtctttaataagaactgcatgattacctacgctgcatatagaaacatattcccaatctgggctttgggtgagtactgtcatagagttttaactgaataa

SEQ ID NO: 212 - DNA, 2112 bp, Artificial Sequence
  Synthetic
atgggttctaataacttcgtcggccgtaagatgtggagattaaaattgggtgaaggtgcaaacaatccttatttgtggtcatccaacaactttgttggtagacagacttgggacttcgaggccgatgaaggtacaccagaagaaagagctcaaatagaagctgctagaaagacctactttcaaaacagattcaaagttcaatgttctaatgatttattctggaagtttcaagttttcgccttctacattactggtcatttgggtaccatctttccagaggaacaccaaaaggaattgttacgttatgcttactgccaccagaacgaagacggtggttggggtttgtacattatgggtgagtcctgtatgttatgtactgtcttgaattatatccaattgagattgttgggtgaagaaccagataccgacgcttgtaacagagcccgtaagtggattttggatcatggtggtgctttatacattccttcttggggtaagatctggttgtccatattgggtgtttacgaatgggacggtgctaacccaatgccaccagaattttggttattcggtaatgctttaccattgaaaccaggtcacttgttgggttactctcgtttgactttattgccaatgtcctatttatatggcaagagatttgtcggtacattaactcctttgattttgcaattgagacaagagatctacacccaaccatactctaatatcaaatggtcacctgccagacactactgtgctaaggaagataagtgcttcgaaagatcatggattcaaaagttggcatgggacgctgttcattacttaggtgaaccattgttgggctcttgggcattcaaatctgttagaaacagagctttgcaaattgccagatttcatatcgattatgaagaccaaaattcccactacatcacaatcggttgtgtcgaaaagccattgtgtactttggctacctgggtcgacgatccaaacggtcaggcctacaagaagcacttagctcgtgttaaggattacttgtggattggtgaagacggtatgaaaatccaatcattcggttctcaatcttgggatgttgctttcgctattcaagccattttggctaccaactttcatagagaattttctgatactttaaaaaagggtcatgatttcataaagaagtcccaaattagagagaatccttctggtgatttccaatccatgtatagacacatctcaaaaggttcctggtctttctctgaccaagatcacggttggcagttgtccgactgcactgctgaaaacttaacttgttgcttaatcttatctacaatgccaccagatatggtcggtgaccctatgaagccacaatgttttttcgatgcagttaatattatcttgtccttacaggccaagaacggtggtgtctccgcttgggaacctaccggtatcgtttcatcttggtttgaaagattgaatccagttgaatttttagaatattctattttggaattggaatacgtcgaatgtacttcttcctctttgcaagccttggttttgttcaaaaagttattcccaaaccacagaaaaaaagaaatcgagactttcataaccaagggtgtcaactatattaaggaaatgcaaaaagacgatggttcttggtacggtaactggggtatttgtcatttgtacgctacctacttcgcaattaaaggtttagttgctgttggttactcttacgactcctgttccacaataagaagaggtgtcgactttttgttaaagatccaatgtccagatggtggttggggtgaatcacatgtctcagtcaccaagaaggtttatactcctttgcaacacaacgcttccaacttggttcaaacttcattcgctttgatggctttgatccacgctcaacaagccaatagagatccaacaccagttcacagagcagctaagttgttgataaactctcaattagaagacggtgactaccctcaacaagaaattactggtgcatttatgggtaattgtatgttgcattatccattgtataaaaacgtcttcccattgtgggctttggccgattattgcaacttggttcctttgccataa

SEQ ID NO: 213 - DNA, 2271 bp, Artificial Sequence
  Synthetic
atgtggaaactaaaggtggcagagggtggcaccccatggttacggacattgaacaatcacgttggacgtcaagtctgggaatttgaccctcattctgggtccccacaggatttggatgacattgaaactgccagaagaaacttccacgataaccgattcacgcataagcacagtgacgatctgcttatgagattgcaatttgctaaggaaaatcccatgaacgaagttttacctaaagtaaaggttaaggatgtcgaagacgttactgaagaggctgtcgctaccactttgagaaggggtctcaacttctattcgaccatacaatctcacgacggtcattggccaggtgatttgggtggtccaatgtttcttatgccaggtttggttatcactttgtcagtaaccggtgctttaaatgccgtcttaacagatgaacatagaaaagaaatgagaagatacttgtacaatcatcaaaacaaggacggtggctggggtttgcacatcgagggtccgagcacaatgttcggatctgttctgtgttatgtcactttgagattgcttggtgaaggtccaaacgatggtgaaggggacatggaacgtggtagagactggattttagaacacggtggtgcgacttacatcacgagttggggtaagatgtggctaagcgttttgggcgtctttgagtggtccggtaacaatccaatgccaccagaaatttggctacttccttacgctctaccagttcacccaggtagaatgtggtgccactgtagaatggtatatttgcccatgtcctacttatacggcaaacgcttcgttggtcccattacccctacggtgttgtctttgaggaaggaattgttcactgttccatatcatgacattgattggaaccaagctcgcaatctttgtgcaaaagaagatttgtactatccacatccattggtccaggatatcctgtgggccaccttacataagtttgttgaaccagtcttcatgaactggccgggtaagaaattaagagagaaggctataaaaactgccattgaacacatccactacgaagacgaaaatacacgttatatatgtatcggacctgtcaacaaggttctcaacatgttgtgttgctgggttgaggatccaaattctgaagctttcaagttgcacttaccaagaatttacgactacttgtgggtggctgaagatggtatgaagatgcaaggttataacggttctcaattatgggacaccgcgtttgctgcccaagctataatcagtactaatttaattgatgaatttggaccgactcttaagaaggctcacgcattcattaagaactcacaagtgtccgaagattgtccaggtgacttgtctaagtggtacagacatatctcaaagggggcctggcccttttccaccgctgaccacggttggccgatctctgattgtaccgctgaaggtttgaaggctgttttgctactatccaagattgcgccggaaattgtcggtgaaccactggactctaaacgtttgtacgacgccgtgaatgttatcttgtccttacaaaacgaaaacggtggcctcgctacttatgagctaacgagatcctacacttggttggaaattattaatccagctgaaacattcggtgacattgttatagactgcccatatgtagagtgtacctctgctgctatccaggcactagccaccttcggcaaactatacccaggtcatcgaagagaagaaatacaatgttgcatcgaaaaagctgtcgcgttcattgaaaaaattcaagcttcagatggttcatggtacggttcttggggagtctgtttcacttacgcaacttggtttggtatcaaaggtttgatcgctgccggtaagaacttctcgaactgtttgtctataagaaaggcttgcgaatttttgttgtccaagcaattgcctagcggtggctgggccgaaagttatctttcctgtcaaaataaggtttattctaatttagaaggtaacagatcgcacgttgtgaacacaggttgggctatgttggcattgattgaagccgagcaagctaagagagatccaacgcctttgcaccgtgcggctgtttgtttaattaactctcaactcgagaacggcgatttccctcaggaagaaatcatgggtgtctttaacaaaaattgtatgattacttacgccgcttaccgttgtatttttccaatctgggctcttggtgaatacagaagagttctgcaagcctgctaa

SEQ ID NO: 214 - DNA, 2295 bp, Artificial Sequence
  Synthetic
atgtggcgtttgaaagtcggagccgagagtgttggcgaagaagatgaaaagtgggtgaagtccgtttctaaccacttaggtaggcaggtatgggaattttgtgctgacgcggcagccgacaccccacatcaactgttgcaaatccaaaatgctagaaaccacttccatcacaatagattccatagaaagcaatcgtctgatctttttttggctatacaatatgaaaaagaaattgctaagggtgctaagggtggtgccgttaaagtcaaggaaggtgaggaagtcgggaaagaagctgttaagagcacactagaaagagctttgggtttctactccgctgtacaaactagagatggtaactgggcatccgacctaggtggtcccttatttttgttacctgggttggttattgcgctccacgtcactggtgttttgaatagtgtcttgtctaagcatcaccgtgttgaaatgtgcagatacctatacaaccatcagaacgaggatggtggttggggtttgcacatcgaaggcacctctaccatgttcggttcagcccttaactatgtcgctttaagactgctcggagaagacgctgacggtggggatggtggtgccatgacgaaggctcgagcttggattttggaacgcggtggtgccactgctatcacatcttggggcaaattgtggttgtcagttttaggtgtttacgaatggagcggtaataatccattaccaccagaattttggttgctaccgtactcattgccattccaccctggtagaatgtggtgtcattgtagaatggtctatttgccaatgtcctacttgtacggaaagagattcgttggtccaataactcctaaagttctttctcttagacaagaattgtatacaattccataccacgaaattgactggaacaagtctcgcaatacctgcgccaaagaggatctgtattacccacatcctaagatgcaagacatcttgtggggttctatttaccatgtgtacgaaccattatttactcggtggccgggcaagaggttaagagagaaagcccttcaagctgcaatgaagcacatccactatgaagatgaaaactcgcgttacatatgtttgggtccagtcaacaaggtcttgaacatgctttgttgttgggttgaagatccatattccgacgcattcaaattgcatttgcagagagtgcacgactacttatgggttgctgaagatggcatgagaatgcaaggatacaatggttcgcaattgtgggacactgctttcagtatccaagctattgttgctaccaagttagtcgattcctacgctcctaccttaagaaaggcccacgatttcgttaaggattcccaaattcaggaagattgtcccggtgatccaaacgtgtggtttcgacacatccataaaggtgcatggccattgtctactagagaccatggttggttaatctctgactgtacggctgaaggtctcaaggcctccttgatgttgtctaaattaccttcgactatggtaggtgaaccactggaaaagaacaggttgtgcgacgctgttaacgttctattatcactccaaaatgacaacggcggtttcgcctcttatgagttgactagatcatacccatggttggaattgattaatccagctgagaccttcggtgacatcgttatcgactatccatacgtcgaatgcactgccgctacaatggaggctttgactttattcaagaaactgcaccctggtcatagaacgaaggaaattgatactgccattggtaaggctgctaattttctggaaaaaatgcaacgtgcagatggtagttggtatggctgttggggtgtctgtttcacctatgctggttggtttggtataaagggattagttgctgcgggtagaacctataattcttgtcttgcgatcagaaaagcttgtgagttcttgctatctaaggaattgcccggaggtggctggggtgaaagctacttgtcctgtcaaaacaaggtctacaccaacttggaaggtaacaagcctcacttggttaacactgcttgggtattaatggccttgattgaagctggacaaggggaaagggatccggcgccattacatagagctgcaagattgctaatgaacagccaattggaaaatggtgatttcgtacaacaggaaattatgggtgtattcaataagaattgcatgattacgtacgccgcctatcgtaacatctttccaatctgggcgctaggtgagtactgtcatcgagtgctaacggaataa

SEQ ID NO: 215 - DNA, 2295 bp, Artificial Sequence
  Synthetic
atgtggcgtttgaaggttggtgctgagtctgtcggagaaaaagacgaaaagtgggtcaaatccgtttcaaatcacttaggtagacaagtttgggaattttgcgccgatgctgatgcagttacccctcatcagtctttgcaaattcacaacgctagaaaccatttccaccaaaatagattcagaagaaagcaatcttccgacttgtttttagctatacaatatgaaaaggagatcgccaagggtgttaaggtcggtgctgttaaagtcaaagaaggtgaagaagttggtaaggaagcagtcaagtctacattggagcgtgctttgtcattctactccgctgtccagacttctgatggtaactgggcctctgacttaggtggtccaatgttcttgttgccaggtttagttattgccttgtacgttactggtgttttaaattccgtcttgtccaagcaccatagattggaaatgtgtagatatttatacaaccatcaaaacgaagatggtggttggggtttgcacatcgaaggttcttccaccatgtttggttcagctttgaactacgtcgctttaagattgttgggtgaagacgttgatggtggtgatggtggagctatgactaagggtagagcatggattttggaccgtggttctgccactgccatcacctcttggggtaaattatggttgtccgttttgggtgtctacgagtggtccggtaacaacccattacctccagaattttggttgttgccatattctttaccattccacccaggtagaatgtggtgtcactgtagaatggtttacttgccaatgtcatatttgtacggtaagagattcgttggtcctataacaccaattgtcttatctttgagaaaggaattgtacaccgttccttaccatgaaatcgactggaataagtccagaaatacttgtgctaaagaagacttgtattacccacacccaaaggtccaagatattttgtggggtactatccaccatgtttacgaaccattgttctctggttggccatgcaaacgtttgagagaaaaggctttgcaaactgccatgaaacacattcactacgaagatgagaactctaactatatctgtttaggtcctgttaacaaggttttgaatatgttatgttgctgggttgaagacccatattcagacgcttttaagttgcatttgcaaagaatccatgatttcttatgggtctctgaggatggtatgaagatgcaaggttacaacggttcacagttgtgggataccgctttttccattcaagccattgcttctacaaagttggttgacacatacggtcactcattaagaaaagcacacaatttcgtcaagaactctcaaatacaacaggattgtccaggtgattccaatgtctggtttagacacatacataaaggtgcttggccattctctacccgtgatcacggttggttaatctccgactgtactgctgaaggtttaaaagcttcattgaccttatctaagttgccatcccaattggttggtgaacctttggaaaagaacagattgtatgacgcagttaatgtcttgttgtcattacaaaacgaaaacggtggtttcgcttcctacgaattaactagatcttatccttggttggagttgattaacccagcagaaacttttggagatattgttatcgattattcttacgttgaatgcactgctgccaccatggaggctttggcattattcaagaagttacacccaggtcatcgtaccaaggaaatcgatacctgtattgctaaggccgccaacttcttggaaacaatgcaaagaactgacggttcttggtatggttgttggggtgtttgtttcacctacgctggttggtttggtatcaaaggtttgatcgctgctggtagaacatacaagacctgtattgctataagaaaggcctgcgattttttattgtctaaagaattgcctggtggtggttggggtgaatcttacttgtcatgtcaaaacaaggtctacactaatttggagggtaatcgtccacacttggtcaatactgcttgggtcttgatggccttgattgaagctggtcaagctaaaagagaccaggccccattgcatagagccgctcgtttattaattaattcacaattggaaaatggtgacttccctcaacaagaaataatgggtgtttttaacaagaattgtatgatcacttatgctgcttacagaaacatctttccaatttgggccttgggagagtattaccatagagttttgactaaataa

SEQ ID NO: 216 - DNA, 2280 bp, Artificial Sequence
  Synthetic
atgtggagattgaaagtaggtgctgaatccgtaggtgaaaacgacgaaaagtggttgaaaagtataagtaatcatttgggtagacaagtctgggaattttgtccagatgcaggtacacaacaacaattgttgcaagtacataaggctagaaaggcatttcatgatgacagattccacagaaagcaatcttcagatttgttcatcaccatccaatacggcaaggaagtagaaaacggtggcaagactgctggtgttaaattgaaggaaggtgaagaagttagaaaagaagcagttgaatccagtttggaaagagccttgtctttctactcttcaatccaaacctctgatggtaattgggcatcagacttgggtggtccaatgttcttgttacctggtttggtcattgccttgtacgtaactggtgttttgaactctgtattgtcaaagcatcacagacaagaaatgtgtagatacgtttacaaccatcaaaacgaagatggtggttggggtttgcacattgaaggtccatccactatgtttggtagtgcattgaattatgtcgccttaagattgttaggtgaagatgcaaacgccggtgctatgcctaaggcaagagcctggatattagaccatggtggtgctactggtatcacatcctggggtaaattgtggttaagtgtcttaggtgtatatgaatggtctggtaataacccattgccacctgaattttggttgttcccttactttttaccattccatcctggtagaatgtggtgtcactgcagaatggtttacttgccaatgtcttacttgtacggcaagagattcgttggtccaataacacctatcgtcttgtcattgagaaaggaattgtacgcagttccttaccatgaaatcgattggaacaagtccagaaacacctgtgctaaggaagatttgtattacccacaccctaaaatgcaagacattttgtggggtagtttacatcacgtttacgaaccattatttactagatggcctgctaaaagattgagagaaaaggcattacaaacagccatgcaacatatccactacgaagatgaaaacaccagatacatctgcttgggtccagttaacaaggtcttgaacttgttgtgttgctgggttgaagatccttattctgacgctttcaagttgcatttgcaaagagtacacgattacttgtgggttgcagaagacggtatgaaaatgcaaggttacaatggttcacaattgtgggatacagctttttccattcaagcaatagtcagtactaagttggtagataactacggtccaacattaagaaaagctcatgacttcgtaaagtccagtcaaatacaacaagattgtccaggtgaccctaatgtttggtatagacatatccacaaaggtgcatggccattttctaccagagatcatggttggttgatttcagactgtactgctgaaggtttgaaggctgcattgatgttgtctaagttgccatcagaaactgttggtgaatccttggaaagaaatagattatgcgatgccgttaacgtcttgttgagtttgcaaaacgacaacggtggtttcgcttcttacgaattgactagatcatacccatggttggaattaattaatcctgctgaaacattcggtgatatcgtcattgactatccatacgtagaatgtacctccgctactatggaagcattgaccttgttcaagaagttgcatcctggtcacagaacaaaggaaatcgataccgcaattgttagagccgctaatttcttggaaaacatgcaaagaacagacggttcttggtatggttgttggggtgtttgctttacctacgctggttggttcggtattaaaggtttagtcgcagccggtagaacatacaataactgtttggccataagaaaagcttgcgatttcttgttatctaaggaattaccaggtggtggttggggtgaatcctacttgagttgtcaaaacaaggtttacactaatttggaaggcaacagacctcatttagttaacacagcctgggtcttgatggctttaatcgaagccggtcaagctgaaagagatccaactcctttgcatagagctgcaagattgttgatcaactcacaattggaaaacggtgattttccacaacaagaaatcatgggtgttttcaacaagaactgcatgataacatatgccgcttacagaaacatttttcctatatgggctttgggtgaatactgccacagagtcttgaccgaataa

SEQ ID NO: 217 - DNA, 2280 bp, Artificial Sequence
  Synthetic
atgtggaggcttaaagtaggcgcggaatcagtcggggagaatgacgaaaagtggctgaaaagcattagtaaccacttgggtcgccaggtgtgggaattttgcccagatgcaggtacgcaacaacaactattacaggttcataaggctagaaaagccttccatgatgaccgttttcacagaaagcaatcgtccgatttattcatcaccatacaatatggaaaagaggttgaaaatggaggtaagacagctggcgtaaaactcaaggagggtgaagaagttagaaaggaggcagtcgaatcttctttggaacgggctttatcgttttactcttcaattcaaacttccgatggtaactgggccagtgacctgggtggtccgatgtttttactacccggcttggttatcgccctttatgtaaccggcgtcctgaatagcgtgctatccaaacatcataggcaggaaatgtgtcgatacgtttataaccaccaaaatgaggatgggggttggggattacatattgaaggaccttcaacaatgttcgggtctgcacttaattatgtcgctttgagactcttaggcgaagacgcaaacgctggtgccatgccaaaagcaagagcgtggatattggatcacggaggtgcgactggtatcacgtcatggggcaaactttggctctcggttttaggagtgtacgagtggagtggcaataatcctctaccacctgaattttggctgtttccttatttcttgccgttccatcccgggcgaatgtggtgtcattgcagaatggtatatttaccaatgagttacctctatggtaagcgttttgtaggtccaattactcctatagttttgtctttacgcaaagaactatacgctgtcccataccatgagatcgattggaacaagtcgcgtaatacatgtgctaaagaagatctttattacccccacccgaaaatgcaggacattctgtgggggtcattgcatcacgtttatgagcccttatttaccagatggccggcgaaaagactaagggaaaaggctttgcaaactgccatgcaacatatacactacgaagatgaaaacacaagatacatttgtttagggcctgtaaataaagtgttgaatttactttgctgttgggtagaagacccatatagcgatgcatttaagctccatttgcagagggttcacgactatttatgggtcgctgaagatggaatgaaaatgcaaggttataatggatctcaattgtgggacacagcatttagcattcaggccattgtctctactaaactcgttgataactacggcccaacgctacggaaggcccatgatttcgtgaaaagcagtcagatacaacaagattgccctggcgatccaaacgtgtggtataggcatatacacaagggtgcttggccattctcaacaagagatcatggttggctgatctccgattgtacagctgagggattaaaggcggcattaatgttgtctaaattaccgagtgaaaccgttggtgagagcttggaaagaaatagactgtgtgatgccgtgaatgtgttgctttccctgcaaaatgacaatggaggtttcgcgtcgtatgaactaactcgatcttatccttggttagaacttatcaaccccgcagaaacctttggggatattgttatcgattatccatacgtggagtgtacttcagcaaccatggaggctttgacactgtttaaaaaacttcatcctggacatcgtactaaggaaattgatacggccatagtacgcgcagctaactttctagaaaatatgcaaagaactgatggtagttggtacggttgctggggcgtttgtttcacttacgctggctggtttggaattaaaggtctagtagctgccggacgtacatataacaattgcttggccattagaaaggcttgtgactttctcttatcaaaagaactacctggtggtgggtggggagagtcttatcttagctgccagaacaaagtatatactaatttggaaggcaacaggccacaccttgttaacacagcatgggtattgatggctctgattgaagctggtcaagctgaacgagacccaacgcccttacacagagcagcaagactgctgatcaattcacagttagaaaatggtgatttccctcagcaagagatcatgggcgtttttaacaagaattgtatgattacttacgccgcatatcgtaacatatttccgatttgggcattaggggaatactgccatagggtgcttactgaataa

SEQ ID NO: 218 - DNA, 2292 bp, Artificial Sequence
  Synthetic
atgtggcgtttgaaagttggtggtgagtctgtcggagaaaaggaagaaaagtgggttaaatcaatatccaatcatttaggtagacaagtctgggaattttgccctcacgatggtacaccagaacagagattgcaagttcaaaaggcaagagacgctttcttcagaattaacagatttcgtagaaagcaatcttccgatttattcttggctatccaatatgaaaaggagatcgccaacggtgctaccgtcggtggtattaaattgaaggagggtgacgaagttagaaaggaagccgttaagtctactttagaacgtgctttgaatttttactctgctgttcagactaccgacggtaactgggcttccgatttgggtggtccaatgttcttattgccaggtttggtcatcgcattatacgttactggtgtcttgaactctgtcttgtcaaaaaatcacagacaagaaatgtgtagatatttgtacaaccatcaaaacgaagatggtggttggggtttgcacattgaaggtccttccaccatgttcggttctgctttaaactacgttgccttgagattgttgggtgaagatgccgacggtggtgacggtggtgctatgactaaggctagagcttggatcttggacagaggaggtgccaccgccattacatcttggggtaaattgtggttatcagttttaggtgtttatgagtggtctggtaataatccattaccaccagaattttggttgttgccatatttcttaccattccatccaggtcgtatgtggtgtcactgtagaatggtctacttacctatgtcctacttgtacggtaagagatttgttggtcctattactccaatcgtcttgtccttgagaaaggaattgtataccgtcccataccacgaagttgattggaacaagtccagaaatacttgtgctaaagaggatttgtactatccacatccaaagatgcaagacatcttgtggggttctatacaccatgtttacgaacctttgttttcaagatggccaggtaagagattaagagaaaaagctttacaatctgcaatgcagcacattcactatgaagatgaaaacactagatacatatgtttaggtccagttaacaaggtcttgaacatgttgtgctgttgggttgaagatccttactctgatgctttcaagttgcatttacaaagagtccatgactacttatgggtttctgaagatggtatgaaaatgcaaggttacaacggttcccaattgtgggacactgccttctcaattcaagctattgcttcaacaaagttagttgactcttatggtccaaccttgagaaaggcacacgacttcgtcaaaaactctcaaatccagcaagattgtccaggtgattccaatgtctggttccgtcatatccacaagggtgcctggcctttctctactagagaccacggatggttgatttctgattgcaccgctgaaggtttgaaggcttcattgatgttgtctaagttaccatccgaaatagtcggtccatctttggagaaaaacagattgtgtgatgcagttaatgttttgttgtctttgcaaaatgacaacggtggttttgcttcctacgaattaacccgttcttacccatggttagaattgatcaacccagcagaaacattcggtgacatcgtcattgattattcatacgttgaatgtacttccgctacaatggaagctttgaccttgtttaagaagttgcacccaggtcatagaactaaagaaattgacaccgccatcggaaaggctgccaacttcttggagaagatgcaacgtactgatggttcttggtacggttgctggggtgtttgtttcacttacgctggttggtttggtattaaaggtttggttgctgctggtagaacatacaattcctgtatagctattcgtaaggcatgtgatttcttgttgtccaaggaattaccaggtggtggttggggtgaatcttacttgtcttgtcaaaacaaagtttacactaatttggaaggtaacagacctcacttagttaacaccgcctgggtcttgatggccttgatcgaagctggtcaagctgagagagaccctgctcctttgcacagagctgccagattattgataaattcccaattagaaaacggtgatttcccacaagaagaaattatgggtgtttttaataagaactgtatgatcacctatgcagcttatagaaacatctttccaatttgggccttaggtgaatactgccatagagttttaactgagtaa

SEQ ID NO: 219 - DNA, 2328 bp, Artificial Sequence
  Synthetic
atgggtagacgtgagagatggggcggtagaagagaaataatgtggagattgaaagttggtggtgaatccgtcggtgaaaaggaagaaaagtgggttaaatctatttcaaaccacttaggtagacaagtttgggaattttgtccacatgacggtacacctgaacagcgtttgcaagtccaaaaggcaagagatgctttcagaatcaatcgtttcagaagaaagcaatcttctgacttgtttttggctatccaatacgagaaggaaattgccaacggtgctactgtcggtggtattaaattaaaggagggtgatgaagtcagaaaagaagccgttaagtccaccttggaaagagctttaaacttctattccgctgttcaaactaccgatggtaattgggcctctgacttgggtggtccaatgtttttattgcctggtttggttatcgctttatacgtcactggtgttttgaactctgttttgtcaaagaatcaccgtcaggaaatgtgcagatacttgtataaccatcaaaacgaagacggtggttggggtttgcacattgaaggtccatccaccatgttcggctctgcattaaattacgttgctttaagattgttgggtgaggatgctgatggtggtgacggtggtgctatgacaaaggcacgtgcctggatcttggacagaggtggtgctactgctataacttcatggggtaaattgtggttgtccgtcttgggtgtctatgaatggtccggtaacaatccattgccaccagaattttggttattaccatacttcttgcctttccacccaggtagaatgtggtgtcattgtagaatggtttatttgcctatgtcatacttgtacggtaagcgtttcgtcggtccaattaccccaattgttttgtctttaagaaaggaattgtacactgttccataccacgaggttgattggaataaatctcgtaacacttgtgccaaggaagacttgtactatccacacccaaaaatgcaagatatcttgtggggttctatccatcacgtctacgaaccattattttctcgttggcctggtaagagattgagagaaaaggctttacaatctgctatgcagcatattcattatgaggatgaaaacaccagatacatttgcttgggtcctgttaacaaagttttaaatatgttgtgttgttgggttgaagatccatattcagatgcatttaagttgcacttgcaaagagttcacgactacttatgggtctccgaagatggtatgaagatgcaaggttacaatggttcccaattgtgggacacagccttctctatacaagctatcgcttcaacaaagttagtcgattcttatggtccaaccttaagaaaggctcatgactttgtcaaaaactctcaaattcaacaagattgcccaggcgattccaacgtctggttcagacatatacacaagggtgcctggccattctcaactagagaccacggttggttgatttccgactgtactgccgaaggtttgaaggcttctttaatgttatctaagttgccatctgaaatcgttggtccttctttagagaaaaacagattgtgtgacgctgttaacgtcttattgtccttgcaaaacgataatggtggttttgcatcttacgaattaaccagatcctacccttggttggaattgattaatccagcagaaactttcggtgacatcgttattgactactcttatgttgaatgtacatccgctaccatggaagctttaactttgttcaagaagttgcacccaggtcatagaaccaaagaaatcgacaccgccataggtaaggctgctaacttcttggagaagatgcaacgtactgacggttcttggtacggttgctggggtgtctgtttcacttacgccggttggtttggtatcaagggtttagtcgctgctggtagaacttataactcctgtatcgctattagaaaggcatgtgattttttgttgtctaaggaattacctggtggtggttggggcgagtcttacttgtcctgtcaaaacaaagtctacactaacttagaaggtaatagaccacacttggttaatactgcatgggtcttaatggctttgattgaagccggtcaggctgaaagagacccagccccattgcatagagctgcccgtttattgattaattcacaattggagaacggtgatttcccacaagaagaaattatgggtgtcttcaacaaaaactgcatgataacctatgctgcatacagaaatatctttccaatctgggctttgggtgaatattgtcacagagttttgacagaataa

SEQ ID NO: 220 - DNA, 2274 bp, Artificial Sequence
  Synthetic
atgtggaaattgaaggtcgccgagggtggctctccatggttacgtacattgaatggtcacattggtagacaagtttgggaatttgaccctaacttgggttccccaaaggatttagaagaaatagaaaagttcagagcagaattttataaaaacagattcgaaactaagcattcatctgatttgttaatgagataccagttctcaaaggaaaacccagttggtaccatcttgccaagagtccaagttaaggacatcggtgatattaccgaggacaatgtcgctactaccttgcgtagagctatttccttttactctactttgcaagctcacgatggtcattgggccgctgactgtggtggtccaatgttcttgttacctggtttagttatcgctttgtctgttacaggtgccttgaacgctgtcttgtctgaagaacacaaaagagagatctgccgttacttatataatcatcaaaactgtgacggtggttggggtttgcacattgaatcccactcaactatgttcggttctgtcttatcttacgttactttgagattgttaggtgaaaaggcaaatggtggtgaaggtgctatggagaagggtagaaaatggatattggatcatggtaccgccactgctattacttcctggggtaagatgtggttgtccgttttgggtttgtttgattggtctggcaacaacccattgcctccagaaatgtggttattgccatacattttgccattccatccaggtagaatgtggtgtcactgccgtatggtttatttacctatgtcttacttatatggtaaaagatttgtcggtccaatcacccctacagttttgtctttaagaaaggaattgttcactgtcccataccacaagatcaattggaacaaggctagaaacgaatgtgctaaggaagatttgtattacccacaccctttgttgcaagacatattatggacttccttggataaattgatcgaaccattgttcatgcattggccaggtaaaaaattgagagaaaaggccttatccaccgttatggaccacattcactacgaagatgaaaatacccgttatatttgtttgggtccagtcaataaggttttaaacatgttatgttgctgggtcgaagattcatcttctgaagcttttaagttacatttgccaagattgtacgactatttatggattgcagaggacggtatgaaaatccaaggttataacggttcccaatcatgggatacctccttcgctatacaggccattatttctactaatttggtcgaggaatacggcccaacattaagaaaggcacacaagtttatgaaaaactcccaagttttggacgattgtcctggtaacttggacttctggtaccgtcacatctcaaagggtgcttggccattctccactgctgatcatggttggccaatttctgactgtacagctgagggtttgaaagcctgtttattgttgtcaaagttgcctgttgaaatcgttggtgaaccattgaaggctaacagattgtacgatgcagttaatgtcatgttatctttgcaaaatccagatggtggtataggtacctacgaattgtctcgttcatatccatggttggaaattatcaatccagctgaaacctttggtgacatcgttatcgattacccatatgttgaatgtacctctgccattatccaggctttagctgctttcaagaaattataccctggttatagaaaggaggatgtcgaaagatgtattgaaaaaggtgctgccttcatagagaagattcaagaagctgacggttcttggtacggttgctggggtgtttgttttacttacggtacttggtttggtgttaagggtttgttggatgcaggtagaaactttaacaactcctacaacattagaaaggcctgtgatttcttattatccaagcaagtcgtctccggtggttggggtgaatcttatttatcttgtcagaacaaggtttataccaacttgaagggtaacaagtctcattccgtttgtacagcttgggctatgttggctttgattgaagcaggtcaaggtgagagagaccctactccattacatagagctgccaaagtcttgattaattctcaattagaaaatggtgatttcccacaacaagaaatctctggtgtcttcaacaaaaactgcatgatctcctactctgcatacagaaatattttcccaatctgggctttgggtcaataccaatctcaattgttgaatccacaataa

SEQ ID NO: 221 - DNA, 2307 bp, Artificial Sequence
  Synthetic
atgtggaaattgaaggttgcagccgagggtgggggtggtcctttattgagatctactaatcgttttgtcggtagaacagtttgggaatttgaaccagatttaggtaccccagaacaaagagctgaagtcgagaaggctagaagagacttctcagatcatagattccagcgtagacactccgctgacgttttgatgcgtatgcaaatgcaacaatactctaaaggtactccattgaagttagatttgccagctgtcaagaagttgggtgaagacgaagatgttactgaagaagccgtttccacctctttgaagagagctatcaacagagtctctgctttacaagcccacgacggtcattggccaggtgattgttccggtcctttgttcttgttgccaggtttaattataaccttgtatgttacaggtgccttgaacgcagtcttatcatctgaacaccaaagagaaattagaagatacttatacaatcaccaaaacgaagatggtggttggggtttgcatatggaaggtcactccgctatgttgggtactaccttgaattatgttgcattaagattaatcggtgagggtccagactctggtggggacgatggtgctgctatggaaagaggtcgtaactggattttgcagagaggtggtgccacttacacaacttcatggggtaaattctggttgaccgttttgggtgtctacgactggtccggtaacaatccattgcctcctgaaatgtggttgttgccatatcatttaccatttcatccaggtagaatgtggtgccactgtcgtgctgtttatttgccaatgtcttacgtttacggtaagagattcgtcggtcgtatcactccattggttttagagttgagaaacgaattgtacggtgatccatattcattgatagattggaataaagctagaaaccaatgtgctaaggaagatttgtattacccacactcctttttacaagacgttttgtgggctaccttgcataaattcgtcgaacctgttatgatgcattggccaggtattaagttcagagaaatcgccttaagaaccgctatgagacacatccactacgaagacgaatctacacgttacattaacttgggtcctgtcaacaaggttttgaacatgttagcttgttggattgaggatccaaattctgaagcttttaagttgcacgtcccaagaatttatgattacttgtggttagctgaagacggtatgaagatgaaaggttacaacggttctcagttgtgggacgctggtttgactgttttggccatcgttaataccgacttaatcgaggaatttggtccaactttaaagttggcccatgcattcgtcaaaaactcacaaataattgacaattgtttggaagatttgaaccaatggtatagacacatgtctaaaggtggttggcctttttccaccgctgaccacggttggtgcgtttccgattgtactgcaactggtttagaagccaccttgttattgtctactatatccccacaaatcgtcggtgaggctatggaagttggtagagtttacgatggggttaactgtttgatttcattgatgaacaataatggtggtttcgcaaccttcgaattgactagatcctatgcttggttagaacatattaacccttcagaaactttcggtggtatcatgatcgattacccatacgtcgaatgcacatcttcttctatacaagccttagcattattcaagaagttgtacccaagacacagaactgaagagatcgactcttgtatttccaagggtgctaactttattgagtcaatgcaaagaaatgatggttcttggtatggttcttggggtgtctgttttacttacgctacatggttcgctgttttcggtttggcttgtgccggtagaacatttgaagattccccagctataaaaaaggcttgcgaatttttattatctaaggaattgccatccggtggttggggtgaatcttacttgtcctgtcaagataaggtctacaccaatttggaggggatgagacctcatgccgtcaacacatcttgggctatgttggctttgattcgtgttggtcaagctgaaagagacccagcaccattgcacagagctgcaagagttttgattaacttgcaatccgaagacggtgaatttccacaacaggagatcatcggtgttttcaatcagaactgtatgattggttactctcaatatagaaacatcttcccaatttgggctttaggtgaataccgtactaaagtccatgtcccacgtaaaaagtaa

SEQ ID NO: 222 - DNA, 2274 bp, Artificial Sequence
  Synthetic
atgtggcgtttgaagtttgctgagggtggatcaccatggttaagaacaactaataaccatgttggtagacaagtctgggaatttgaccctagattgggtaccccagaagaattggcagaaatagaggaagctagaaaatccttcgccgaaaacagattcgttcacaagcactcttctgatttattgatgcgtttacagttctccagagagaatccagtcagacaagttttgccacaagtcgaagttaaggatactgacgatatctctaaagaagctgtcaagtctaccttggaaagagccttgtcattctattcagctgttcaaacttctgacggtaactgggcatctgacttaggtggtcctatgtttttgttaccaggtttggtcattgctttgtccatcaccggtgctttgaatgccgttttatccgaacaacataagcaagaaatgtgccgttacttgtacaaccaccagaacgaagatggtggttggggtttacatattgaaggtccttctactatgttcggttctgttttgaactatgttacaatgagattgttgggtgaaggtccaaacgatggtgacggtgctatggaaaagggtagagactggattttgaatcacggtggtgctacctacatcacctcctggggtaaaatgtggttaactgtcttaggtgtttttgagtggtctggaaacaatccattgcctccagaaatttggttgttgccatacatattaccaatccacccaggtagaatgtggtgtcattgtagaatggtctatttgccaatgtcttacttgtatggtaaacgtttcgtcggtcctattaccccaactgttttatccttgagaaaggaattattcaccgttccataccatgaggtcgattggaacaaggcaagaaatttgtgtgctaaggaagatttatactacccacacccagttgttcaagacattttgtgggcctctttgcataaggttgttgaaccaatattgatgcgttggccagtcactaaattgagagaaaaagcattaagaactgctatcgaacacatccattatgaagacgagaatacaagatatatctgcttgggtcctgttaacaaggtcttaaatttgttgtgttgttgggtcgaagatccttactcagatgcttttaagttgcacttgcaacgtgtccacgattacttgtgggtcgctgaagacggtatgaaaatgcaaggttataacggttctcaattatgggataccgccttttccattcaagctattttcgctactaactttgttgaagagtacggtgacgtcttgaagaaggctaactcctacataaaagattcccaaattcaagaggactgtccaggtgacccaaacgtttggttcagacacatccacaagggtgcctggcctttctctaccagagatcatggttggttaatctcagattgtactgctgaaggtttgaaagcctcattgatgttgtccaagttgccatctaccatggttggtgaaccattggaagctaatagattgtgcgacgcagtcaacgttttgttatcattgcagaatgataacggtggtttcgcttcctacgaattgacaagatcttacccatggttagaattaattaacccagccgaaactttcggtgacatcgttattgactatccatatgtcgaatgtacttctgcaaccatggaggctttaaccttatttaagaagttgcacccaggacatagaacaaaggaaatagatcaatgtatcaagaaggctgctaagttcttggaaaaaatgcaaagagcagatggttcctggtacggttgttggggtgtctgtttcacttacgctggttggtttggtataaaaggtttagttgctgccggtagaacttacaactcttgtttggcaattagaaaggcttgtgaatttttgttatctaaggaattgccaggtggtggttggggtgagtcatatttatcctgccaaaataaggtttacactaacttggaaggtaataagcctcatttggtcaacactgcctgggtcttgatggccttgattgaagctggtcaacacgaacgtgacccaaagcctttgcatcgtgctgctagatatttgatcaattcccaattagaaaatggtgatttcccacagcaagaaattatgggtgttttcaacaaaaactgtatgatcacatacgccgcttacagaaacatttttcctatttgggctttaggtgaatacagatctcaagttttgcaagctgcataa

SEQ ID NO: 223 - DNA, 1992 bp, Artificial Sequence
  Synthetic
atggaccgtcagtcatttagagataatagattccatagaaagcaatcttccgatttgttcttagccatacaatttgcagaagagaaacaatctgtcactaacttgccacaaacaaagttagaagaatttgaagacgttaagaaagaggctgttaagtccaccttggaaagagctttgtctttctactccgctgtccaaacttctgacggtaactgggcctctgatttgggaggtcctatgttcttattgccaggtttggttattaccttatatgtcaccggtgctttgaatactgttttgtcaaaagaacaccagtacgaaatctgtcgttatttgtacaaccaccaaaacagagacggtggttggggtttacatatcgaaggtccatcaactatgtttggtacagttttgaattacgtttctttaagattgttaggtgaaggtgctgaaggtggtgagggtgctattgaaaaggctagacgtatgtggtgccactgtagaatggtctacttgccaatgtccttcttgtatggtaagaaattcgttggtccaattactcctaccatcttatccttgagaaaggaattatacaccgtcccataccatgaagttgattggaacaaggccagaaatgcatgtgccaaggaagatttgtattaccctcacccattggttcaagacattttgtgggcttctttgcactacttgtatgaaccaatgttgaagtactggccttgtaaatctttgagagagaaggccttacaaatcgttatgcaacatatccactatgaagacgaaaacactcgttatatttgcttaggtccagtcaataaagtcttaaacatgttgtgttgttgggtcgaggatccatactccgaatcttttaagttgcacttgccacgtatattggactacttgtggattgctgaagatggtatgaagatgcaaggttacaacggttctcaattatgggatacagctttcgctatacaagcaattatctccaccggtttagctgacgagtacggttccgttttgagaaaggctcatgacttcttaaaagattcacaaatccaagaagactgtccaggagatccaaacgtctggtttagacacattcataaaggtgcttggccattttctactagagatcatggttggttgatttccgattgcactgccgaaggtttaaaggcttctttgatgttgtctaagttgccatcaactatggtcggtgaacctttggaagttaatagattatgtgatgctgttaacgttttattgtctttgcagaacgacaatggtggtttcgcctcctatgaattaaccagatcatacccatggttggaattgattaacccagctgagaccttcggtgatatcgttatcgactacccatatgttgaatgtacctctgctactatggaagccttaacattgtttaagaaattacacccaggtcatagaacaaaggaaattgatataggtagagctgtcgaatttttggagaagatgcaaagagcagacggttcctggtatggttgttggggtgtttgcttcacttacgcaggttggttcggtatcaagggattggtcgctgctggtagaacctataattcctgtttggctattagaaaggcttgcgaatttttgttatctaaagaattacctggtggtggttggggtgaatcctacttgtcctgtcagaacaaggtttacacaaatttggaaggtaacaagccacacttggttaatactgcatgggtcttgatggcattaattgaggccggtcaagctgaacgtgatcctaccccattacacagagctgctaaaatcttaattaattctcaaatggaagacggtgatttcccacaagaagagatcatgggtgtttttaacaagaactgtatgatctcttactccgcttacagaaacattttcccaatatgggccttgggtgaatatcattgtcgtgtcttgcaggcaccataa

SEQ ID NO: 224 - protein, 756 aa, Spinacia oleracea
MWRLKIAEGGSPWLRTTNNHVGRQIWEFDPNLGTPEQIREVEEARENFWKNRFEQKHSSDLLMRMQFAQENSSNVVLPQVKVKDEDEITKEAVKSTLERALSFYSAVQTSDGNWASDLGGPMFLLPGLVIALSVTGALNAVLSKEHQKEMCRYLYNHQNKDGGWGLHIEGHSTMFGTVLTYVTLRLLGEGVDDGDGAMERGRKWTLEHGSATAITSWGKMWLSVLGVFEWAGNNPMPPETWLLPYILPVHPGRMWCHCRMVYLPMSYLYGKRFVGPITPTVLSLRRELFDVPYHEIDWDRARNECAKEDLYYPHPLVQDILWASLHKAVEPILMRWPGKKLREKALSTVMEHIHYEDENTRYICLGPVNKVLNLLCCWVEDPYSDAFKLHLQRVHDYLWVAEDGMKMQGYNGSQLWDTAFSIQAILATNLGEEYGGTLRKAHNFIKDSQIQEDCPGDPNVWFRHIHKGAWPFSTRDHGWLISDCTAEGLKASLMLSKLPSTMVGEPLEVNRLCDAVNVLLSLQNDNGGFASYELTRSYPWLELINPAETFGDIVIDYPYVECTSATMEALTLFKKLHPGHRTKEIDNCIKKAAKFLEKMQRADGSWYGCWGVCFTYAGWFGIKGLVAAGRTYNSCLAIRKACEFLLSKELPGGGWGESYLSCQNKVYTNLEGNKPHLVNTAWVLMALIEAGQAKRDPMPLHRAAKVLINSQMPNGDFPQQEIMGVFNRNCMITYAAYRNIFPTWALGEYRTQVLQK

SEQ ID NO: 225 - protein, 761 aa, Unknown
  Aquilaria agallocha
MWRLKTGSETVGDNGRWLRSTNNHVGRQVWEFFPEMGSPEELVAIEAAHREFHLNRFHKQHSSDLLMRLQYEREKPCVQKEGAVRLDATETPTEAAVETTLRRALTFYSTMQSDDGNWASDLGGPMFLLPGLVIALYVTGVLNSVLSKEHQREIRRYLYNHQNQDGGWGLHIEGPSTMFGSALNYVTLRLLGEGPDDGEGAMERARQWILSRGGAVAVTSWGKLWLSVLGVYEWDGNNPLPPELWLLPYSLPLHPGRMWCHCRMVYLPMSYLYGKRFVGPITPTVLSLREELYPIPYHHVDWNKARNTCAQDDLYYPHPFVQDLLWGSLYHVYEPLVMRWPGKRLRERALQHVMKHIHYEDENSRYICLGPVNKALNMLCCWVEDPHSEAFKMHIPRIYDYLWIAEDGMRMQGYNGSQLWDTAFSVQAIVATKLTDEFSETLAKANKYILDAQILKNCPGDPNVWFRHIHKGAWPFSTRDHGWLISDCTAEGLKASLMLSKLPSKIVGEPLEKNRLYDAVNVLLSLQNENGGFASYELTRSYPWLELINPAETFGDIVIDYTYVECTSATMEALTLFKKLHPGHRKKEIERCMANAAKFLEMRQEADGSWYGCWGVCYTYAGWFGIKGLVAAGRTYNNCANIRRACDFLLSKQLPNGGWGESYLSCQNKLYTNLNNDRMHTVNTAWAMMALIEAGQAKTDPMPLHHAARTLINAQMETGDFPQQEIMGVFNKNCMITYAAYRNVFPVWALGEYHHRVLNGC

SEQ ID NO: 226 - protein, 761 aa, Unknown
  Aquilaria agallocha
MWRLKTGSETVGDNGRWLRSTNNHVGRQVWEFFPEMGSPEELVAIEAAHREFHLNRFHKQHSSDLLMRLQYEREKPCVQKEGAVRLDATETPTEAAVETTLRRALTFYSTMQSDDGHWANDLGGPMFLLPGLVITLTITGTINVVLSKEHQREIRRYLYNHQNQDGGWGLHIEGPSTMFGSALNYVTLRLLGEGPDDGEGAMERARQWILSRGGAVAVTSWGKLWLSVLGVYEWDGNNPLPPELWLLPYSLPLHPGRMWCHCRMVYLPMSYLYGKRFVGPITPTVLSLREELYPIPYHHVDWNKARNTCAQDDLYYPHPFVQDLLWGSLYHVYEPLVMRWPGKRLRERALQHVMKHIHYEDENTEYICLGPVNKALNMLCCWVEDPHSEAFKMHIPRIYDYLWIAEDGMKMQGYNGSQLWDTAFAVQAIVATKLTDEFSETLAKANKYILDAQILKNCPGDPNVWYRHITKGAWSFSTADQGWLVSDCTAEGLKALLLYSMLPHQKAPSSIEKNRLYDAVNVLLSMQNADGGFASFELTRSYPWLEMINPAETFGDIVIDYTYVECTSAVIQALALFKRLHPGHRKKEIERCMANAAKFLEMRQEADGSWYGCWGVCYTYAGWFGIKGLTSCGRTYNNCANIRRACDFLLSKQLPNGGWGESYLSCQNKLYTNLNNDRMHTVNTAWAMMALIEAGQAKTDPMPLHHAARTLINAQMETGDFPQQEIMGVFNKNCMISYAGYRNVFPVWALGEYHHRVLNGC

SEQ ID NO: 227 - protein, 741 aa, Unknown
  Aquilaria agallocha
MWRLKIAEGKEGPYLKSTNNFVGRQTWEFDPDAGTPEERAAVEEARRAFYSNRYRVKPPADLLWRLQFMREKNFKQIIPMVRIKDGEAITHEKATATLRRAVHFLTVLQSIDGHWPAENAGCHYFLPPLVFCLYITGHLSSVFSQEHQREILRYIYNHQNEDGGWGLHIEGHSIMFSTALSYICLRILGEGLEGGQDNACAKAQKWILDHGSVTHIPSWGKTWLSVLGLFDWSGSNPIPPEFWMLPSFLPIHPGKIWSYCRTTYMPMSYLYGKKFVAPITPLIIQLRKELYLQPYDEINWRKVRHLCAKEDLYYPHPVIQDLMWDCLYVFTEPLLNRWPLNKMIREKALKVTMNHIHYEDENSSYINMACVGKVLCTLACWVEDPNGDYFKKHLARIPDYIWVAEDGMTMQGLASQTWDSGLAIQALFASNLIDEIGPTLKRAHDFIKKSQVLDNPFGDFKKMFRHSSKGSWTFSVRDHGWPVSDCTAEGLKCCLLLSMLPQEIVGEKLEVERLHDAVNIIFHLQSKNGGVAAWEPVRASKWLELLNPIEFLEDIVVDHEYLECTASSIDALQLFKKLYPTCEREEIENFILKAVEYIENIQMSDGSWYGNWGVCFIYGTLFALKGLAKAGKTYDDCVAMRKGVDFLLRIQRDDGGWGESYKSCPNKKFEPLQREGSNVVQTAWAILGLIESRQIMRDPTPLHRAIKFIINSQLEDGDFPQQVRGLSYIYSSLSFLPVIKM

SEQ ID NO: 228 - protein, 766 aa, Unknown
  Benicasa hispida
MWRLKIGADTVLTDPSNAGGRWLSTLSNHLGRQVWEFCAELGSPEDLQQIQHARQRFSDHRFEKKHSTDLLMRMQFAKENSSFVNLPQIKVKDKEDVTEEAVTRTLKRAINFYSTIQAHDGNWASDLGGPMFLLPGLVIALYVTGVLNSVLSTEHQREICRYLYNHQNRDGGWGLHIEGPSTMFGSVLNYVTLRLLGEEAEDGQGGVDKARKWILDHGGATAITSWGKMWLSVLGVYEWAGNNPLPPELWLLPYLLPCHPGRMWCHCRMVYLPMCYLYGKRFVGPITPIIRSLRKELYLVPYHEVDWNVARNQCAKEDLYYPHPLVQDVLWASLHHVYEPLFMCWPAKRLREKALRTVMQHIHYEDENSRYICLGPVNKVLNMLCCWVEDPHSEAFKLHIPRLYDYLWIAEDGMRMQGYNGSQLWDTAFSVQAIMSTKLSEEYGTTLRKAHKYIQDSQVQEDCPGDPNVWFRHIHKGAWPFSTRDHGWLISDCTAEGLKASLMLSKLPSKIVGEPLEKERLYDAVNVLLSLQNENGGFASYELTRSYPWLELINPAETFGDIVIDYPYVECTSAAIQALAAFKKLYPGHRSNEIGNSIAKAADFIESIQATDGSWYGSWGVCFTYAGWFGIKGLVAAGRTYNSCSSLRKACDFLMSKELAAGGWGESYLSCQDKVYTNIKDDRPHLVNTGWAMLSLIDAGQAERDPTPLHRAARILINSQMEDGDFPQEEIMGVFNKNCMITYAAYRNIFPIWALGEYRCRVLQAS

SEQ ID NO: 229 - protein, 764 aa, Unknown
  Citrullus colocynthis
MWRLKVGAESVGEKEEKWLKSISNHLGRQVWEFCAHQPTASPNHLQQIDNARNHFRNNRFHRKQSSDLFLAIQNEKEIANVTKGGGIKVKEEEDVRKETVKNTVERALSFYSAIQTNDGNWASDLGGPMFLLPGLVIALYVTGVLNSVLSKHHRQEMCRYLYNHQNEDGGWGLHIEGTSTMFGSALNYVALRLLGEDADGGEGGAMTKARSWILDRGGATAITSWGKLWLSVLGVYEWSGNNPLPPEFWLLPYCLPFHPGRMWCHCRMVYLPMSYLYGKRFVGPITPIVLSLRKELYTIPYHEIDWNRSRNTCAKEDLYYPHPKMQDILWGSIYHLYEPLFTRWPGKRLREKALQMAMKHIHYEDENSRYICLGPVNKVLNMLCCWVEDPYSDAFKFHLQRVPDYLWVAEDGMRMQGYNGSQLWDTAFSVQAIISTKLIDSFGTTLKKAHDFVKDSQIQQDCPGDPNVWFRHIHKGAWPFSTRDHGWLISDCTAEGLKASLMLSKLPSKIVGEPLEKSRLCDAVNVLLSLQNENGGFASYELTRSYPWLELINPAETFGDIVIDYPYVECTSATMEALTLFKKLHPGHRTKEIDIAVARAANFLENMQRTDGSWYGCWGVCFTYAGWFGIKGLVAAGRTYNSCVAIRKACDFLLSKELPGGGWGESYLSCQNKVYTNLEGNRPHLVNTAWVLMALIEAGQAERDPAPLHRAARLLINSQLENGDFPQEEIMGVFNKNCMITYAAYRNIFPIWALGEYFHRVLTE

SEQ ID NO: 230 - protein, 764 aa, Unknown
  Citrullus colocynthis
MWRLKVGAESVGEKEEKWLKSISNHLGRQVWEFCADQPTASPNHLQQIDNARKHFRNNRFHRKQSSDLFLAIQNEKEIANGTKGGGIKVKEEEDVRKETVKNTVERALSFYSAIQTNDGNWASDLGGPMFLLPGLVIALYVTGVLNSVLSKHHRQEMCRYLYNHQNEDGGWGLHIEGTSTMFGSALNYVALRLLGEDADGGEGGAMTKARGWILDRGGATAITSWGKLWLSVLGVYEWSGNNPLPPEFWLLPYCLPFHPGRMWCHCRMVYLPMSYLYGKRFVGPITPIVLSLRKELYTIPYHEIDWNKSRNTCAKEDLYYPHPKMQDILWGSIYHLYEPLFTRWPGKRLREKALQMAMKHIHYEDENSRYICLGPVNKVLNMLCCWVEDPYSDAFKFHLQRVPDYLWIAEDGMRMQGYNGSQLWDTAFSVQAIISTKLIDSFGTTLKKAHDFVKDSQIQQDFPGDPNVWFRHIHKGAWPFSTRDHGWLISDCTAEGLKASLMLSKLPSKIVGEPLEKSRLCDAVNVLLSLQNENGGFASYELTRSYPWLELINPAETFGDIVIDYPYVECTSATMEALTLFKKLHPGHRTKEIDTAVAKAANFLENMQRTDGSWYGCWGVCFTYAGWFGIKGLVAAGRTYSTCVAIRKACDFLLSKELPGGGWGESYLSCQNKVYTNLEGNRPHLVNTAWVLMALIEAGQAERDPAPLHRAARLLINSQLENGDFPQEEIMGVFNKNCMITYAAYRNIFPIWALGEYFHRVLTE

SEQ ID NO: 231 - protein, 764 aa, Cucurbita maxima
MWRLKVGAESVGEKDEKWVKSVSNHLGRQVWEFCADAAADTPHQLLQIQNARNHFHHNRFHRKQSSDLFLAIQYEKEIAKGAKGGAVKVKEGEEVGKEAVKSTLERALGFYSAVQTSDGNWASDLGGPMFLLPGLVIALHVTGVLNSVLSKHHRVEMCRYLYNHQNEDGGWGLHIEGTSTMFGSALNYVALRLLGEDADGGDGGAMTKARAWILERGGATAITSWGKLWLSVLGVYEWSGNNPLPPEFWLLPYSLPFHPGRMWCHCRMVYLPMSYLYGKRFVGPITPKVLSLRQELYTIPYHEIDWNKSRNTCAKEDLYYPHPKMQDILWGSIYHVYEPLFTRWPGKRLREKALQAAMKHIHYEDENSRYICLGPVNKVLNMLCCWVEDPYSDAFKLHLQRVHDYLWVAEDGMRMQGYNGSQLWDTAFSIQAIVATKLVDSYAPTLRKAHDFVKDSQIQEDCPGDPNVWFRHIHKGAWPFSTRDHGWLISDCTAEGLKASLMLSKLPSTMVGEPLEKNRLCDAVNVLLSLQNDNGGFASYELTRSYPWLELINPAETFGDIVIDYPYVECTAATMEALTLFKKLHPGHRTKEIDTAIGKAANFLEKMQRADGSWYGCWGVCFTYAGWFGIKGLVAAGRTYNSCLAIRKACEFLLSKELPGGGWGESYLSCQNKVYTNLEGNKPHLVNTAWVLMALIEAGQGERDPAPLHRAARLLMNSQLENGDFVQQEIMGVFNKNCMITYAAYRNIFPIWALGEYCHRVLTE

SEQ ID NO: 232 - protein, 774 aa, Cucumis melo
MWRLKVGKESVGEKEEKWIKSISNHLGRQVWEFCSGENENDDDEAIAVANNSASKFENARNHFRNNRFHRKQSSDLFLAIQCEKEIIRNGAKNEGTTKVKEGEDVKKEAVKNTLERALSFYSAVQTSDGNWASDLGGPMFLLPGLVIALYVTGVLNSVLSKHHRQEMCRYIYNHQNEDGGWGLHIEGSSTMFGSALNYVALRLLGEAADGGEHGAMTKARSWILERGGATAITSWGKLWLSVLGVYEWSGNNPLPPEFWLLPYSLPFHPGRMWCHCRMVYLPMSYLYGKRFVGPITPIVLSLRKELYTIPYHEIDWNRSRNTCAKEDLYYPHPKMQDILWGSIYHVYEPLFSGWPGKRLREKAMKIAMEHIHYEDENSRYICLGPVNKVLNMLCCWVEDPYSDAFKFHLQRIPDYLWLAEDGMRMQGYNGSQLWDTAFSIQAIISTKLIDTFGPTLRKAHHFVKHSQIQEDCPGDPNVWFRHIHKGAWPFSTRDHGWLISDCTAEGLKASLMLSKLPSKIVGEPLEKNRLCDAVNVLLSLQNENGGFASYELTRSYPWLELINPAETFGDIVIDYSYVECTSATMEALALFKKLHPGHRTKEIDAAIAKAANFLENMQKTDGSWYGCWGVCFTYAGWFGIKGLVAAGRTYNNCVAIRKACNFLLSKELPGGGWGESYLSCQNKVYTNLEGNKPHLVNTAWVMMALIEAGQGERDPAPLHRAARLLINSQLESGDFPQQEIMGVFNKNCMITYAAYRNIFPIWALGEYSHRVLDM

SEQ ID NO: 233 - protein, 723 aa, Unknown
  Coccinia grandis
MWRLKLGKGENEDYLFSTNDFIGRQTWEFDPNAGTPQERAQVEAARLNFYQNRNHVQCSSDLLWRFQFLEEKNFKQAIPKVVVEERNGNDRELSIKKETVKTALRRATNFFAALQSNHGHWPAENAGPLYYLPPLVFALYITRDLNTILSKEHQKEILRYVYCHQNEDGGWGLHIASRQSCMLCTVLNYIELRLLGEEADNEACSRARKWILDHGGALYIPSWGKIWLSILGLYEWEGTNPMPPEIWMFGKILPWNLGGLLCYTRLTLLPMSYLYGKRFVGPLTPLILQLRHEIYTQPYNDIKWSPARHLCAKEDEYFERSIFQKLVWDVVTYVGEPILKSWAFKKIRNRAIQIAKWYMDYEDQNSHYITIGCVEKPLFTLTSWVVDPHGEAYKKHLARIKDYLWVGEDGMKMQSFGSQSWDVAFAIQAILATNLHHEFSETLKKGHDFIKQSQVKKNPSGDFPRMYRHISKGSWTFSDQDHGWGVSDCAAENLLCCLKLSTMPSHIVGDSMEPQCFFEAVNFILSLQAKDGGLSAWEPAGTLPLWFEVLNPVEFFEYTVLEIECVECTSSAIQALVLFKKLFPSHRKKEIDNFIEKATNYIKEIQKEDGSWYGNWGICHIYGTYFAIKGLAAAGNTYENCSTVTKAVDFLLKIQCPDGGWGESHISCLNKVHTPLPGNASNLVQTSFALMSLIHSQQVCFFLFFFFPSFLPICTLPSLIIIF

SEQ ID NO: 234 - protein, 765 aa, Unknown
  Coccinia grandis
MWRLKVGADTVPADPSKSGGWLSTLSNHLGRQVWEFCAELGSPEDLQQIQHARQHFSDHRFEKKHSADLLMRMQFAKENSSFVNLPQIKVKDKEDVMEEAVTRTLKRAINFYSTIQADDGNWASDLGGPMFLLPGLVIALYVTGVLNSVLSTEHQREICRYLYNHQNRDGGWGLHIEGPSTMFGSVLNYVTLRLLGEEAEDGEGGVDKARKWILDHGGATAITSWGKMWLSVLGVYEWTGNNPLPPELWLLPYLLPVHPGRMWCHCRMVYLPMCYLYGKRFVGPITPIIRSLRKELYLVPYHEVDWNEARNLCAKEDLYYPHPLVQDILWASLHHVYEPLFMRWPAKRLREKALRTVMQHIHYEDENSRYICLGPVNKVLNMLCCWVEDPHSEAFKLHIPRVYDYLWIAEDGMRMQGYNGSQLWDTAFSVQAIISTKLAEEYGTTLRKAHEYIKDSQVLEDCPGDPNVWFRHIHKGAWPFSTRDHGWLISDCTAEGLKASLMLSKLPSKIVGEPLEKERIYDSVNVLLSLQNENGGFASYELTRSYPWLELINPAETFGDIVIDYPYVECTSAAIQALAAFKKLYPGHRSNEIGNCIAKAADFIESIQATDGSWYGSWGVCFTYAGWFGIKGLVAAGRTYNNCLSLRKACDFLLSKELAGGGWGESYLSCQDKVYTNIKDDRPHIVNTGWAMLSLIEVGQAERDPTPLHRAARILINSQMDDGDFPQEEIMGVFNKNCMITYAAYRNIFPIWALGEYRCRVLQAP

SEQ ID NO: 235 - protein, 785 aa, Cucumis sativus
MWRLKVGKESVGEKEEKWIKSISNHLGRQVWEFCAENDDDDDDEAVIHVVANSSKHLLQQQRRQSSFENARKQFRNNRFHRKQSSDLFLTIQYEKEIARNGAKNGGNTKVKEGEDVKKEAVNNTLERALSFYSAIQTGDGNWASDLGGPMFLLPGLVIALYVTGVLNSVLSKHHRQEMCRYIYNHQNEDGGWGLHIEGSSTMFGSALNYVALRLLGEDANGGECGAMTKARSWILERGGATAITSWGKLWLSVLGVYEWSGNNPLPPEFWLLPYSLPFHPGRMWCHCRMVYLPMSYLYGKRFVGPITPMVLSLRKELYTIPYHEVDWNRSRNTCAQEDLYYPHPKMQDILWGSIYHVYEPLFNGWPGRRLREKAMKIAMEHIHYEDENSRYICLGPVNKVLNMLCCWVEDPYSDAFKFHLQRIPDYLWLAEDGMRMQGYNGSQLWDTAFSIQAILSTKLIDTFGSTLRKAHHFVKHSQIQEDCPGDPNVWFRHIHKGAWPFSTRDHGWLISDCTAEGLKASLMLSKLPSKIVGEPLEKNRLCDAVNVLLSLQNENGGFASYELTRSYPWLELINPAETFGDIVIDYSYVECTSATMEALALFKKLHPGHRTKEIDAALAKAANFLENMQRTDGSWYGCWGVCFTYAGWFGIKGLVAAGRTYNNCVAIRKACHFLLSKELPGGGWGESYLSCQNKVYTNLEGNRPHLVNTAWVLMALIEAGQGERDPAPLHRAARLLINSQLENGDFPQQEIMGVFNKNCMITYAAYRNIFPIWALGEYSHRVLTE

SEQ ID NO: 236 - protein, 764 aa, Unknown
  Cucurbita foetidissima
MWRLKVGAESVGEKDEKWVKSVSNHLGRQVWEFCADADAVTPHQSLQIHNARNHFHQNRFRRKQSSDLFLAIQYEKEIAKGVKVGAVKVKEGEEVGKEAVKSTLERALSFYSAVQTSDGNWASDLGGPMFLLPGLVIALYVTGVLNSVLSKHHRLEMCRYLYNHQNEDGGWGLHIEGTSTMFGSALNYVALRLLGEDADGGDGGAMTKARAWILERGGATAITSWGKLWLSVLGVYEWSGNNPLPPEFWLLPYSLPFHPGRMWCHCRMVYLPMSYLYGKRFVGPITPKVLSLRQELYTVPYHEIDWNKSRNTCAKEDLYYPHPKMQDILWGSIYHVYEPLFTRWPGKRLREKALQTAMKHIHYEDENSRYICLGPVNKVLNMLCCWVEDPYSDAFKLHLQRVHDYLWVAEDGMRMQGYNGSQLWDTAFSIQAIVATKLVDSYGPTLRKAHDFVKDSQIQEDCPGDPNVWFRHIHKGAWPFSTRDHGWLISDCTAEGLKASLMLSKLPSTMVGEPLEKSRLCDAVNVLLSLQNDNGGFASYELTRSYPWLELINPAETFGDIVIDYPYVECTAATMEALTLFKKLHPGHRTKEIDTAIAKAANFLEKMQRTDGSWYGCWGVCFTYAGWFGIKGLVAAGRTYNSCVAIRKACEFLLSKELPGGGWGESYLSCQNKVYTNLEGNKPHLVNTAWVLMALIEAGQGERDPAPLHRAARLLMNSQLENGDFLQQEIMGVFNKNCMITYAAYRNIFPIWALGEYCHRVLTE

SEQ ID NO: 237 - protein, 765 aa, Cucumis melo
MWQLKVGADTVPSDPSNAGRWLSTLNNHVGRQVWHFHPELGSPEDLQQIQNARQHFYDHRFEKKHSSDILMRMQFAKENSSFVNLPQIKVKEKEDVVEEAVTQTLRRAMNFYSTIQADDGHWPGDYGGPMFLLPGLVITLSITGALNAVLSTEHQREICRYLYNHQNRDGGWGLHIEGPSTMFGSVLSYVTLRLLGEEAEDGQGGVENARKWILDHGGATAITSWGKMWLSVLGVYEWAGNNPLPPELWLLPYLLPFHPGRMWCHCRMVYLPMCYLYGKRFVGPITPIIRSLRKELYLVPYHEIDWNEARNQCAKEDLYYPHPLVQDVLWASLHHVYEPLFMRWPAKRLREKALRTVMQHIHYEDENTRYICIGPVNKVLNMLCCWVEDPHSEAFKLHIPRIYDYLWLAEDGMKMQGYNGSQLWDTAFAVQAIMSTKLVEEYGTTLRKAHKYIKDSQVLEDCPGDLQSWYRHISKGAWPFSTADHGWPISDCTAEGLKAVVLLSKLPSEIVGKPVDEERMYDAVNVILSLQNTDGGFATYELTRSYRWLELMNPAETFGDIVIDYPYVECTSAAIQALAAFRKLYPGHRSNEIGNCIAKAADFIESIQATDGSWYGSWGVCFTYGGWFGIKGLVAAGRRYENSSSLRKACDYLLSKELPAGGWGESYLSCQDKVYTNIKDDRPHLVNTAWAMLSLIDAGQAERDPTPLHRAARILINSQMEDGDFPQEDIMGVFNKNCMISYSAYRNIFPIWALGAYRCRVLLAS

SEQ ID NO: 238 - protein, 765 aa, Unknown
  Cucumis metuliferus
MGEMWKLKFSKGWETSENDHVGRQYWEFDTNLTPSEEEKAQIQKFYNEFYNYRFQAKHSSDLLMRFQLRKENNGGEVKLPTQIKITGEEEINEEAIEKTLRRGIRFYSTLQTQDGFWPGDYGGPLFLLPALVIGLSVTKALDTAISVHHRHEMCRYLYNHQNEDGGWGLHIEGNSTMLCTALSYVSLRLLGEKMDGRDGVLLKARRWILDRGGATSIPSWGKTWLSVLGVYEWEGNNPLPPEIWLLPYSLPLHPGRMWCHSRMVYLPMSYLYGKRFVGPISPIIISLRRELYTCSYHTIDWNLSRNLCAKEDLYTPHSKIQNILWNSIHKFGEPLLKKWPLSKVRQKALDFVIQHIHYEDENTHYLCLGPISKVLNMVCCWAEDPNSEAFRRHIPRIKDYLWLAEDGMKMQGYNGSQLWDVVFAVQAILATDLVDEYGSVLKKAHNFIKNSQMKRNGIKDQNNPSVWYRHMSKGGWPFSTPDNAWPVSDCTAEALKAAILLSQMPTTMVGEPIDVHNLYDAVNLILSLQNSNGGFASYELTRSYPWLEMLNPAEIFGDVMIDYQYVECTSAAIQGLKAFMKLHPGYRKKDIQTCISKAAHFIETIQLPDGSWYGSWGICYTYGTWFGIKGLVACGRTYANSKCIRKATQFLLSKQLKSGGWGESYLSAHHKVYADLKDGKSHIVNTSWALLALIQADQAQRDPSPLHRAATVLINSQMDDGDFPQQEIMGVFNKSCMISYAAYRNIFPIWALGEYRIRVLQLPEN

SEQ ID NO: 239 - protein, 766 aa, Cucurbita pepo
MWRLKIGADTVPSDPSNAGGWLSTLSNHLGRQVWEFCAELGSPEDLQQIQQARQRFSDHRFEKKHSADLLMRMQFAKENSSFVNLPQVKVKDKEEVSEEAVTRTLRRAINFYSTIQADDGNWASDLGGPMFLLPGLVIALYVTGVLNSVLSTEHQREICRYLYNHQNRDGGWGLHIEGPSTMFGSVLNYVTLRLLGEEAEDGQGAVDKARKWILDHGGAAAITSWGKMWLSVLGVYEWAGNNPLPPELWLLPYLLPCHPGRMWCHCRMVYLPMCYLYGKRFVGPITPIIRSLRKELYLVPYHEVDWNKARNQCAKEDLYYPHPLVQDILWASLHHVYEPLFMHWPAKRLREKALQSVMQHIHYEDENSRYICLGPVNKVLNMLCCWAEDPHSEAFKLHIPRIYDYLWIAEDGMRMQGYNGSQLWDTAFSVQAIISTELAEEYETTLRKAHKYIKDSQVLEDCPGDPNVWFRHIHKGAWPFSTRDHGWLISDCTAEGLKASLMLSKLPSKIVGEPLEKQQLYNAVNVLLSLQNENGGFASYELTRSYPWLELINPAETFGDIVIDYPYVECSSAAIQALAAFKKLYPGHRRDEINNCIAKAADFIESIQATDGSWYGSWGVCFTYAGWFGIKGLVAAGRTYNNCSSLRKACDFLLSKELAAGGWGESYLSCQNKVYTNIKDDRPHIVNTGWAMLSLIDAGQSERDPTPLHRAARVLINSQMEDGDFPQEEIMGVFNKNCMITYAAYRNIFPIWALGEYRSRVLKLLK

SEQ ID NO: 240 - protein, 762 aa, Cucurbita pepo
MWRLKIADGGNDPYIYSTNDFIGRQTWEFDPEAGTPEERQEVEEARHHFYRNRYKVKPSADCLWRMQFLREKKFKQEIGAVKIKEGEEISQDKARIALRRAVHFYSALQASDGHWPAENAGPLFFLPPLVMCLYITGHLDQVFPEEHKKEILRYIYCHQNEDGGWGLHIEGHSTMFCTALSYICMRILGEGPDGGLNNACARGRKWILDHGSVTYIPSWGKTWLSILGVYDWAGSNPMPPEFWLLPSFLPMHPAKMWCYCRMVYMPMSYLYGKRFVCQITPLIQELRLELHAQPFDEINWKKTRHLCTKEDVYYPHPLMQDLLWDSLYICTEPLLTRWPFNKLVREKALQVTMKHIHYEDDNSRYITIGCVEKVLCMLACWVEDPDGDYFKKHLARIPDYIWVAEDGMKMQSFGSQEWDTGFAIQALLAADMADEIGPVLARGHDFIKKSQVKDNPSGNFKTMHRHISKGSWTFSDQDHGWQVSDCTAEALKCCLLFSLMRPEIVGDKMEAQRLYDSVNVLLSLQSKNGGLAAWEPATGQKWLEMLNPTEFFADIVIEHEYVECTASAIQALILFKKLHPGHRTKEIDNFIQNAVRYLQDIQMPDGSWYGNWGVCFTYGCWFALGGLVAAAKTFNNCAAIRKGVHFLLNIQMPDGGWGESYHCCPSKKYVPLEGKRSNLVHTAWAMMALIHSGQAERDPTPLHRAAKLLINSQTEDGDFPQQEITGVFMKNCMLHYAAYRNIYPLWALAEYSKRVKLASTSP

SEQ ID NO: 241 - protein, 762 aa, Cucurbita pepo
MWRLKVADGGNDPYIYSMNNFVGRQIWEFDPDAGSPDERAEVERVRNEFTKNRLKGFPSADLLWRLQLLREKNFKQSIPPVKVEDGEEITYEMASDAMKRGAYFLEAIQASDGHWPSETSGPLFYLCPLLICMYIMGFMDSAFSPEHKKEMMRYLYNHQNEDGGWGLHVGGHSNMFCTTFNYISLRLLGEEPDVEAVAKGRIWIRDHGGVTSILSWGKTWLSILNLFDWSASNPMPPEYWMFPTWVPIHPSNMMCYTRITYMPMSYLYGKRFQAPLTPLVLQLRDELHTQAYEKINWRKVRHMCATEDLYFPHPFVQDLLWDTLYMLSEPLMTRWPFNKLIRQKALDETMRHIHYEDENSRYITIGCVEKPLCMLACWVEDPNSEYVKKHFARIPDYLWMAEDGMKMQSFGSQSWDAALAMQALLACNITHDIGSALNNGHEFIKNSQVRNNPPGDYKSMFRYMSKGSWTFSDCDHGWQVSDCTAENLKCCLLLSLLPPEIVGEKMEPQRFYDAVNVILNMQSKNGGLPAWEPASSYYWMEWLNPVEFLEDLIIEHQHVECTSSALQAILLFRKQYPEHRKKEINNFINKAVQFLQDIQLPDGSWYGNWGICYTYGTWFALKALSMAGKTYENCEALRKGANFLIKIQNPEGGFGESYLSCPYKRYIPLDGKRSNLVQTAWGMMGLIAAGQADVDPGPIHRAAKLLINSQTEDGDFPQEEITGEFFKNCTLHFAAFREVFPVMALGEYCNKVPLPSKKNTIN

SEQ ID NO: 242 - protein, 759 aa, Cucurbita pepo
MWRLKVADGGNDPYIYSMSNHLGRQVWEFCADAGSPDERAEVERVRNEFTKNRLKGFPSADLLWRLQLLREKNFKQSIPPVKVEDGEEITYEMASDAMKRGAYFLEAIQASDGNWASDLGGPMFLLPGLVIALYVTGVLNSAFSPEHKKEMMRYLYNHQNEDGGWGLHVGGHSNMFCTTFNYISLRLLGEEPDVEAVAKGRIWIRDHGGVTSILSWGKTWLSILNLFDWSASNPMPPEYWMFPTWVPIHPSNMMCYTRITYMPMSYLYGKRFQAPLTPLVLQLRDELHTQAYEKINWRKVRHMCATEDLYFPHPFVQDLLWDTLYMLSEPLMTRWPFNKLIRQKALDETMRHIHYEDENSRYICLGPVEKPLCMLACWVEDPNSEYVKKHFARIPDYLWMAEDGMRMQGYNGSQLWDTAFSQALLACNITHDIGSALNNGHEFIKNSQVRNNPPGDPNVWFRHIHKGAWPFSTRDHGWLISDCTAEGLKASLMLSKLPSKIVGEPLEKYDAVNVLLSLQNENGGFASYELTRSYPWLELINPAETFGDIVIDYQHVECTSSALQAILLFRKQYPEHRKKEINNFINKAVQFLQDIQLPDGSWYGNWGICYTYAGWFGIKGLVAAGRTYNNCEALRKGANFLIKIQNPEGGFGESYLSCPYKRYIPLDGKRSNLVQTAWGMMGLIAAGQADVDPGPIHRAAKLLINSQTEDGDFPQEEIMGVFNKNCMITYAAFREVFPVMALGEYCNKVPLPSKKNTIN

SEQ ID NO: 243 - protein, 785 aa, Cucumis sativus
MWRLKVGKESVGEKEEKWIKSISNHLGRQVWEFCAENDDDDDDEAVIHVVANSSKHLLQQQRRQSSFENARKQFRNNRFHRKQSSDLFLTIQYEKEIARNGAKNGGNTKVKEGEDVKKEAVNNTLERALSFYSAIQTSDGNWASDLGGPMFLLPGLVIALYVTGVLNSVLSKHHRQEMCRYIYNHQNEDGGWGLHIEGSSTMFGSALNYVALRLLGEDANGGECGAMTKARSWILERGGATAITSWGKLWLSVLGVYEWSGNNPLPPEFWLLPYSLPFHPGRMWCHCRMVYLPMSYLYGKRFVGPITHMVLSLRKELYTIPYHEIDWNRSRNTCAQEDLYYPHPKMQDILWGSIYHVYEPLFNGWPGRRLREKAMKIAMEHIHYEDENSRYICLGPVNKVLNMLCCWVEDPYSDAFKFHLQRIPDYLWLAEDGMRMQGYNGSQLWDTAFSIQAILSTKLIDTFGSTLRKAHHFVKHSQIQEDCPGDPNVWFRHIHKGAWPFSTRDHGWLISDCTAEGLKASLMLSKLPSKIVGEPLEKNRLCDAVNVLLSLQNENGGFASYELTRSYPWLELINPAETFGDIVIDYSYVECTSATMEALALFKKLHPGHRTKEIDAALAKAANFLENMQRTDGSWYGCWGVCFTYAGWFGIKGLVAAGRTYNNCVAIRKACHFLLSKELPGGGWGESYLSCQNKVYTNLEGNRPHLVNTAWVLMALIEAGQGERDPAPLHRAARLLINSQLENGDFPQQEIMGVFNKNCMITYAAYRNIFPIWALGEYSHRVLTE

SEQ ID NO: 244 - protein, 758 aa, Vitis vinifera
MWRLKVADGGNDPYIDSTNNFVGRQIWEFDPDYGTPDERAEVEAARENFWKNRFQVKLSSDLLWRMQFARENPCVTNLPQIKVQDLEEVTEEVVTTTLRRGLNFYSTIQAHDGHWPGDCGGPMFLLPGLVITLYVTGALHVVLSIEQQREMCRYLCNHQNEDGGWGLHIEGPSTMFGTVLNYVTLRLLGEADFGAKGAMEKGQKWILDHGGATAITSWGKMWLSVLGAYEWFGTNPLPPEMWLCPYILPVHPGRMWCHCRMVYLPMSYLYGKKFVGPITSTIISLRKELYIVPYHEVDWNQARNQCAKEDLYYPHPLVQDILWASLHKVLEPILGHWPGNNLREKALCTVMQHVHYEDENTRYICLGPVNKVLNMLCCWIEDPNSEAFKLHIPRIFDYLWIAEDGMKMQGYSGSQLWDTSFAVQAIISTNLGEEYGLTLRKAHEFIKNSQVLEDCPGDLKFWYRHISKGAWPFSTADQGWPISDCTAEGLKAVLLLSKLPVETVGEPLDMKHLSDAVNVILSLQNADGGFATYELTRSYRWVELINPAETFGDIVIDYPYVECTSAAIQALTSFKKLYPEHRRHEIENCISKAAKFIEEIQAPDGSWYGCWGVCFTYGGWFGITGLIAAGNTYSNCPCIRKACDYLLSKELASGGWGESYLSCQNKVYTNLPGDKPHIVNTAWAMLALIEAGQAGRDPNPLHRAARILINSQMKNGDFPQEEIMGVFNKNCMINYSAYRNIFPIWALGEHRSRVLHSS

SEQ ID NO: 245 - protein, 786 aa, Unknown
  Gynostemma cardiospermum
MGNIKERKGKDRERQREMWKLKIGGESVGKNNEEKWLKSISNHLGRQVWEFCPKLETETETETESQIENARNTFHLNRFHKKQSSDLFITLQYGNEIAKIEGVKIKEKEEVREEAVKTTLERALNFYSAIQTSDGHWASDLGGPMFLLPGLVITLYVTGVLNSVLSKHHRQEICRYLYNHQNEDGGWGLHIEGPSTMFGSVLNYVALRLLAQDSEYDSILKGRRWILDHGGATGITSWGKLWLSVLGVYEWCGNNPLPPEFWILPYFLPFHPGRMWCHCRMVYLPMSYLYGKRFVGPITPTVLSLRKELYTVPYHEIDWNKSRNTCAKEDLYYPHPKIQDILWASLHHVYEPFFTRWPGKRLRDKALHAAMQHIHYEDENTRYICLGPVNKVLNMLCCWVEDPHSDAFKFHLQRVYDYLWVAEDGMKMQGYNGSQLWDTAFSVQAIISTKLTENFGPTLRKAHNFIKLSQIQQDCPGDPNIWYRHIHKGAWPFSTADHGWLISDCTAEGLKASLLLSKVSSNTVGEPLERNRLFDAVNVLLSLQNKNGGIASYELTRSYPWLELINPAETFGDIVIDYPYVECTSATIEALALFKKLYPGHRTKEIDNVIAKAAKFLEDMQREDGSWYGCWGVCFTYAGWFGIKGLVAAGRQYNNSPTIRKACNFILSKELPGGVGGWGESYLSCQNKVYTNLDGNRPHLVNTSWALMALIEAGQADRDPTPLHRAARLLINSQLENGDFPQQEIMGVFNKNCMITYAAYRNIFPIWALGEYCHRVLNQHRSSPLF

SEQ ID NO: 246 - protein, 769 aa, Unknown
  Gynostemma cardiospermum
MWKLKIGGESVGKNNEEKWLKSISNHLGRQVWEFCPKLETETETETESQIENARNTFHLNRFHKKQSSDLFITLQYGNEIAKIEGVKIKEKEEVREEAVKTTLERALNFYSAIQTSDGHWASDLGGPMFLLPGLVITLYVTGVLNSVLSKHHRQEICRYLYNHQNEDGGWGLHIEGPSTMFGSVLNYVALRLLAQDSEYDSILKGRRWILDHGGATGITSWGKLWLSVLGVYEWCGNNPLPPEFWILPYFLPFHPGRMWCHCRMVYLPMSYLYGKRFVGPITPTVLSLRKELYTVPYHEIDWNKSRNTCAKEDLYYPHPKIQDILWASLHHVYEPFFTRWPGKRLRDKALHAAMQHIHYEDENTRYICLGPVNKVLNMLCCWVEDPHSDAFKFHLQRVYDYLWVAEDGMKMQGYNGSQLWDTAFSVQAIISTKLTENFGPTLRKAHNFIKLSQIQQDCPGDPNIWYRHIHKGAWPFSTADHGWLISDCTAEGLKASLLLSKVSSNTVGEPLERNRLFDAVNVLLSLQNKNGGIASYELTRSYPWLELINPAETFGDIVIDYPYVECTSATIEALALFKKLYPGHRTKEIDNVIAKAAKFLEDMQREDGSWYGCWGVCFTYAGWFGIKGLVAAGRQYNNSPTIRKACNFILSKELPGGVGGWGESYLSCQNKVYTNLDGNRPHLVNTSWALMALIEAGQADRDPTPLHRAARLLINSQLENGDFPQQEIMGVFNKNCMITYAAYRNIFPIWALGEYCHRVLNQHRSSPLF

SEQ ID NO: 247 - protein, 759 aa, Unknown
  Siraitia grosvenorii
MWRLKVGAESVGENDEKWLKSISNHLGRQVWEFCPDAGTQQQLLQVHKARKAFHDDRFHRKQSSDLFITIQYGKEVENGGKTAGVKLKEGEEVRKEAVESSLERALSFYSSIQTSDGNWASDLGGPMFLLPGLVIALYVTGVLNSVLSKHHRQEMCRYVYNHQNEDGGWGLHIEGPSTMFGSALNYVALRLLGEDANAGAMPKARAWILDHGGATGITSWGKLWLSVLGVYEWSGNNPLPPEFWLFPYFLPFHPGRMWCHCRMVYLPMSYLYGKRFVGPITPIVLSLRKELYAVPYHEIDWNKSRNTCAKEDLYYPHPKMQDILWGSLHHVYEPLFTRWPAKRLREKALQTAMQHIHYEDENTRYICLGPVNKVLNLLCCWVEDPYSDAFKLHLQRVHDYLWVAEDGMKMQGYNGSQLWDTAFSIQAIVSTKLVDNYGPTLRKAHDFVKSSQIQQDCPGDPNVWYRHIHKGAWPFSTRDHGWLISDCTAEGLKAALMLSKLPSETVGESLERNRLCDAVNVLLSLQNDNGGFASYELTRSYPWLELINPAETFGDIVIDYPYVECTSATMEALTLFKKLHPGHRTKEIDTAIVRAANFLENMQRTDGSWYGCWGVCFTYAGWFGIKGLVAAGRTYNNCLAIRKACDFLLSKELPGGGWGESYLSCQNKVYTNLEGNRPHLVNTAWVLMALIEAGQAERDPTPLHRAARLLINSQLENGDFPQQEIMGVFNKNCMITYAAYRNIFPIWALGEYCHRVLTE

SEQ ID NO: 248 - protein, 765 aa, Lagenaria siceraria
MWRLKVGADTVPADPSNAGGWLSTLSNHLGRQVWEFCAELGSPEDLQQIQHARQRFSDHRFEKKHSADLLMRMQFAKENSSFVNLPQIKVKDKEDVIEEAVTRTLRRAINFYSTIQADDGNWASDLGGPMFLLPGLVIALYVTGVLNSVLSTEHQREICRYLYNHQNRDGGWGLHIEGPSTMFGSVLNYVTLRLLGEEAEDGQGGVDKARKWILDHGGATAITSWGKMWLSVLGIYEWAGNNPLPPELWLLPYLLPCHPGRMWCHCRMVYLPMCYLYGKRFVGPITPIIRSLRKELYLVPYHEVDWNEARNQCAKEDLYYPHPLVQDVLWASLHHVYEPLFMRWPAKRLREKALRSVMQHIHYEDENSRYICLGPVNKVLNMLCCWAEDPHSEAFKLHIPRIYDYLWIAEDGMRMQGYNGSQLWDTAFSVQAIISTKLAEEYGTTLRKAHKYIKDSQVLEDCPGDPNVWFRHIHKGAWPFSTRDHGWLISDCTAEGLKASLMLSKLPSKIVGEPLEKERIYDAVNVLLSLQNENGGFASYELTRSYPWLELINPAETFGDIVIDYPYVECTSAAIQALAAFKKLYPGHRSNEIGNCIAKAADFIESIQATDGSWYGSWGVCFTYAGWFGIKGLVAAGRTYNNCSSLRKACDFLLSKELAAGGWGESYLSCQDKVYTNIKDDRPHIVNTGWATLSLIDAGQAERDPTPLHRAARVLINSQMDDGDFPQEEIMGVFNKNCMITYAAYRNIFPIWALGEYRCRVLQAP

SEQ ID NO: 249 - protein, 758 aa, Linum usitatissimum
MWRLKIAEGGNPWLRTTNDHVGRQVWEFDPELGSPEELSAIELARRDFTKNRFEHKHSADLLMRIQFSKENPLERVLPQVKLKEKEDVTKEAVKSTLERALSFYSAVQTSDGNWASDLGGPMFLLPGLVIALSVTGAMNAVLSEQHKSEMRRYLYNHQNEDGGWGLHIEGPSTMFGSVLSYVTLRLLGEGANDGEGAMEKGRDWIVNHGGATAITSWGKMWLSVLGVFEWSGNNPLPPEIWLLPYMLPIHPGRMWCHCRMVYLPMSYLYGKRFVGPITPTVLSLRKELFSTPYHEIDWNRARNECAKEDLYYPHPLIQDLLWGSLHNFVEPILMAWPGKKLREKALRTTLEHIHYEDENTRYICLGPVNKVLNLLCCWVEDPYSDAFKLHLQRVHDYLWVAEDGMKMQGYNGSQLWDTAFSIQAILSTNLIEEYASTLKKAHAFVKDSQIQEDCPGDPNVWFRHIHKGAWPFSTRDHGWLISDCTAEGLKASLMLSKLPSTMVGEPLEANRLCDAVNVLLSLQNDNGGFASYELTRSYPWLELINPAETFGDIVIDYPYVECTSATMEALTLFKKLHPGHRTKEIDTCIKKAVAFLEKMQRADGSWYGCWGVCFTYAGWFGIKGLVAAGRTYNSCLAIRKACEFLLSKELPGGGWGESYLSCQNKVYTNLEGNKPHLVNTAWVLMALIEAGQAERDPAPLHRAARFLINSQMENGDFPQQEIMGVFNRNCMITYSAYRDIFPIWALGEYRTKVLHASS

SEQ ID NO: 250 - protein, 759 aa, Linum usitatissimum
MWRLKISEGGNPWLRTTNNHVGRQVWEFDPELGSPEELSAIELARRDFTKNRFEQKHSADLLMRIQFSKENPLERVLPQVKLREKEDVTKEAVKSTLERALSFYSAVQTSDGNWASDLGGPMFLLPGLVIALSVTGAMNAVLSEQHKSEMCRYLYNHQNEDGGWGLHIEGPSTMFGSVLSYVTLRLLGEGPNDGEGAMGKGRDWILNHGGATAITSWGKLWLSVLGVFEWSGNNPLPPEIWLLPYMLPIHPGRMWCHCRMVYLPMSYLYGKRFVGPITPTVLSLRKELFSTPYHEIDWNRARNECAKEDLYYPHPLIQDLLWGSLHNFVEPILMAWPGKKLREKALRTTLEHIHYEDENTRYICLGPVNKVLNLLCCWVEDPYSDAFKLHLQRVHDYLWVAEDGMKMQGYNGSQLWDTAFSIQAILSTNLVEEYASTLKKAHTYVKDSQIQEDCPGDPNVWFRHIHKGAWPFSTRDHGWLISDCTAEGLKASLMLSKLPSTMVGEPLEANRLCDAVNVLLSLQNDNGGFASYELTRSYPWLELINPAETFGDIVIDYPYVECTSATMEALTLFKKLHPGHRTKEIDTCIKKAVAFLEKMQRADGSWYGCWGVCFTYAGWFGIKGLVAAGRTYNSCLAIRKACEFLLSKELPGGGWGESYLSCQNKVYTNLEGNKPHLVNTAWVLMALIEAGQAERDPAPLHRAARFLINSQMENGDFPQQDIMGVFNRNCMITYAAYRDIFPIWALGEYRTKVLHASPS

SEQ ID NO: 251 - protein, 762 aa, Momordica charantia
MWRLKVGAESVGENDEKWVKSISNHLGRQVWEFCPDAGTPQQLLQIEKARKAFQDNRFHRKQTSDLLVSIQCEKGTTNGARVPGTKLKEGEEVRKEAVKSTLERALSFYSSIQTSDGNWASDLGGPMFLLPGLVIALCVTGALNSVLSKHHRQEMCRYLYNHQNEDGGWGLHIESPSTMFGSALNYVALRLLGEDADGGEGRAMTKARAWILGHGGATAITSWGKLWLSVLGVYEWSGNNPLPPEFWLLPYFLPFHPGRMWCHCRMVYLPMSYLYGKRFVGPITPVVLSLRKELYTVPYHEIDWNKSRNTCAKEDLYYPHSKMQDILWGSIHHMYEPLFTHWPAKRLREKALKTAMQHIHYEDENTRYICLGPVNKVLNMLCCWVEDPYSEAFKLHLQRVHDYLWVAEDGMKMQGYNGSQLWDTAFSVQAIISTKLVDNYGPTLRKAHDYVKNSQIQQDCPGEPNVWFRHIHKGAWPFSTRDHGWLISDCTAEGLKASLMLSKLPSETVGEPLERNRLCDAVNVLLSLQNDNGGFASYELTRSYPWLELINPAETFGDIVIDYPYVECTSATMEALALFKKLHPGHRTKEIDTAIARAADFLENMQRTDGSWYGCWGVCFTYAGWFGIKGLVAAGRAYSNCLAIRKACDFLLSKELPGGGWGESYLSCQNKVYTNLEGNRPHLVNTAWVLMALIEAGQGERDPAPLHRAARLLINSQLENGDFPQEEIMGVFNKNCMITYAAYRNIFPIWALGEYCHRVLTE

SEQ ID NO: 252 - protein, 703 aa, Momordica charantia
MGSNNFVGRKMWRLKLGEGANNPYLWSSNNFVGRQTWDFEADEGTPEERAQIEAARKTYFQNRFKVQCSNDLFWKFQVFAFYITGHLGTIFPEEHQKELLRYAYCHQNEDGGWGLYIMGESCMLCTVLNYIQLRLLGEEPDTDACNRARKWILDHGGALYIPSWGKIWLSILGVYEWDGANPMPPEFWLFGNALPLKPGHLLGYSRLTLLPMSYLYGKRFVGTLTPLILQLRQEIYTQPYSNIKWSPARHYCAKEDKCFERSWIQKLAWDAVHYLGEPLLGSWAFKSVRNRALQIARFHIDYEDQNSHYITIGCVEKPLCTLATWVDDPNGQAYKKHLARVKDYLWIGEDGMKIQSFGSQSWDVAFAIQAILATNFHREFSDTLKKGHDFIKKSQIRENPSGDFQSMYRHISKGSWSFSDQDHGWQLSDCTAENLTCCLILSTMPPDMVGDPMKPQCFFDAVNIILSLQAKNGGVSAWEPTGIVSSWFERLNPVEFLEYSILELEYVECTSSSLQALVLFKKLFPNHRKKEIETFITKGVNYIKEMQKDDGSWYGNWGICHLYATYFAIKGLVAVGYSYDSCSTIRRGVDFLLKIQCPDGGWGESHVSVTKKVYTPLQHNASNLVQTSFALMALIHAQQANRDPTPVHRAAKLLINSQLEDGDYPQQEITGAFMGNCMLHYPLYKNVFPLWALADYCNLVPLP

SEQ ID NO: 253 - protein, 756 aa, Pisum sativum
MWKLKVAEGGTPWLRTLNNHVGRQVWEFDPHSGSPQDLDDIETARRNFHDNRFTHKHSDDLLMRLQFAKENPMNEVLPKVKVKDVEDVTEEAVATTLRRGLNFYSTIQSHDGHWPGDLGGPMFLMPGLVITLSVTGALNAVLTDEHRKEMRRYLYNHQNKDGGWGLHIEGPSTMFGSVLCYVTLRLLGEGPNDGEGDMERGRDWILEHGGATYITSWGKMWLSVLGVFEWSGNNPMPPEIWLLPYALPVHPGRMWCHCRMVYLPMSYLYGKRFVGPITPTVLSLRKELFTVPYHDIDWNQARNLCAKEDLYYPHPLVQDILWATLHKFVEPVFMNWPGKKLREKAIKTAIEHIHYEDENTRYICIGPVNKVLNMLCCWVEDPNSEAFKLHLPRIYDYLWVAEDGMKMQGYNGSQLWDTAFAAQAIISTNLIDEFGPTLKKAHAFIKNSQVSEDCPGDLSKWYRHISKGAWPFSTADHGWPISDCTAEGLKAVLLLSKIAPEIVGEPLDSKRLYDAVNVILSLQNENGGLATYELTRSYTWLEIINPAETFGDIVIDCPYVECTSAAIQALATFGKLYPGHRREEIQCCIEKAVAFIEKIQASDGSWYGSWGVCFTYATWFGIKGLIAAGKNFSNCLSIRKACEFLLSKQLPSGGWAESYLSCQNKVYSNLEGNRSHVVNTGWAMLALIEAEQAKRDPTPLHRAAVCLINSQLENGDFPQEEIMGVFNKNCMITYAAYRCIFPIWALGEYRRVLQAC

SEQ ID NO: 254 - protein, 764 aa, Cucurbita pepo
MWRLKVGAESVGEEDEKWVKSVSNHLGRQVWEFCADAAADTPHQLLQIQNARNHFHHNRFHRKQSSDLFLAIQYEKEIAKGAKGGAVKVKEGEEVGKEAVKSTLERALGFYSAVQTRDGNWASDLGGPLFLLPGLVIALHVTGVLNSVLSKHHRVEMCRYLYNHQNEDGGWGLHIEGTSTMFGSALNYVALRLLGEDADGGDGGAMTKARAWILERGGATAITSWGKLWLSVLGVYEWSGNNPLPPEFWLLPYSLPFHPGRMWCHCRMVYLPMSYLYGKRFVGPITPKVLSLRQELYTIPYHEIDWNKSRNTCAKEDLYYPHPKMQDILWGSIYHVYEPLFTRWPGKRLREKALQAAMKHIHYEDENSRYICLGPVNKVLNMLCCWVEDPYSDAFKLHLQRVHDYLWVAEDGMRMQGYNGSQLWDTAFSIQAIVATKLVDSYAPTLRKAHDFVKDSQIQEDCPGDPNVWFRHIHKGAWPLSTRDHGWLISDCTAEGLKASLMLSKLPSTMVGEPLEKNRLCDAVNVLLSLQNDNGGFASYELTRSYPWLELINPAETFGDIVIDYPYVECTAATMEALTLFKKLHPGHRTKEIDTAIGKAANFLEKMQRADGSWYGCWGVCFTYAGWFGIKGLVAAGRTYNSCLAIRKACEFLLSKELPGGGWGESYLSCQNKVYTNLEGNKPHLVNTAWVLMALIEAGQGERDPAPLHRAARLLMNSQLENGDFVQQEIMGVFNKNCMITYAAYRNIFPIWALGEYCHRVLTE

SEQ ID NO: 255 - protein, 764 aa, Unknown
  Sechium edule
MWRLKVGAESVGEKDEKWVKSVSNHLGRQVWEFCADADAVTPHQSLQIHNARNHFHQNRFRRKQSSDLFLAIQYEKEIAKGVKVGAVKVKEGEEVGKEAVKSTLERALSFYSAVQTSDGNWASDLGGPMFLLPGLVIALYVTGVLNSVLSKHHRLEMCRYLYNHQNEDGGWGLHIEGSSTMFGSALNYVALRLLGEDVDGGDGGAMTKGRAWILDRGSATAITSWGKLWLSVLGVYEWSGNNPLPPEFWLLPYSLPFHPGRMWCHCRMVYLPMSYLYGKRFVGPITPIVLSLRKELYTVPYHEIDWNKSRNTCAKEDLYYPHPKVQDILWGTIHHVYEPLFSGWPCKRLREKALQTAMKHIHYEDENSNYICLGPVNKVLNMLCCWVEDPYSDAFKLHLQRIHDFLWVSEDGMKMQGYNGSQLWDTAFSIQAIASTKLVDTYGHSLRKAHNFVKNSQIQQDCPGDSNVWFRHIHKGAWPFSTRDHGWLISDCTAEGLKASLTLSKLPSQLVGEPLEKNRLYDAVNVLLSLQNENGGFASYELTRSYPWLELINPAETFGDIVIDYSYVECTAATMEALALFKKLHPGHRTKEIDTCIAKAANFLETMQRTDGSWYGCWGVCFTYAGWFGIKGLIAAGRTYKTCIAIRKACDFLLSKELPGGGWGESYLSCQNKVYTNLEGNRPHLVNTAWVLMALIEAGQAKRDQAPLHRAARLLINSQLENGDFPQQEIMGVFNKNCMITYAAYRNIFPIWALGEYYHRVLTK

SEQ ID NO: 256 - protein, 759 aa, Unknown; identical to SEQ ID NO: 247
  Siraitia grosvenorii

SEQ ID NO: 257 - protein, 759 aa, Unknown; identical to SEQ ID NO: 247
  Siraitia grosvenorii

SEQ ID NO: 258 - protein, 763 aa, Trichosanthes kirilowii
MWRLKVGGESVGEKEEKWVKSISNHLGRQVWEFCPHDGTPEQRLQVQKARDAFFRINRFRRKQSSDLFLAIQYEKEIANGATVGGIKLKEGDEVRKEAVKSTLERALNFYSAVQTTDGNWASDLGGPMFLLPGLVIALYVTGVLNSVLSKNHRQEMCRYLYNHQNEDGGWGLHIEGPSTMFGSALNYVALRLLGEDADGGDGGAMTKARAWILDRGGATAITSWGKLWLSVLGVYEWSGNNPLPPEFWLLPYFLPFHPGRMWCHCRMVYLPMSYLYGKRFVGPITPIVLSLRKELYTVPYHEVDWNKSRNTCAKEDLYYPHPKMQDILWGSIHHVYEPLFSRWPGKRLREKALQSAMQHIHYEDENTRYICLGPVNKVLNMLCCWVEDPYSDAFKLHLQRVHDYLWVSEDGMKMQGYNGSQLWDTAFSIQAIASTKLVDSYGPTLRKAHDFVKNSQIQQDCPGDSNVWFRHIHKGAWPFSTRDHGWLISDCTAEGLKASLMLSKLPSEIVGPSLEKNRLCDAVNVLLSLQNDNGGFASYELTRSYPWLELINPAETFGDIVIDYSYVECTSATMEALTLFKKLHPGHRTKEIDTAIGKAANFLEKMQRTDGSWYGCWGVCFTYAGWFGIKGLVAAGRTYNSCIAIRKACDFLLSKELPGGGWGESYLSCQNKVYTNLEGNRPHLVNTAWVLMALIEAGQAERDPAPLHRAARLLINSQLENGDFPQEEIMGVFNKNCMITYAAYRNIFPIWALGEYCHRVLTE

SEQ ID NO: 259 - protein, 775 aa, Trichosanthes kirilowii
MGRRERWGGRREIMWRLKVGGESVGEKEEKWVKSISNHLGRQVWEFCPHDGTPEQRLQVQKARDAFRINRFRRKQSSDLFLAIQYEKEIANGATVGGIKLKEGDEVRKEAVKSTLERALNFYSAVQTTDGNWASDLGGPMFLLPGLVIALYVTGVLNSVLSKNHRQEMCRYLYNHQNEDGGWGLHIEGPSTMFGSALNYVALRLLGEDADGGDGGAMTKARAWILDRGGATAITSWGKLWLSVLGVYEWSGNNPLPPEFWLLPYFLPFHPGRMWCHCRMVYLPMSYLYGKRFVGPITPIVLSLRKELYTVPYHEVDWNKSRNTCAKEDLYYPHPKMQDILWGSIHHVYEPLFSRWPGKRLREKALQSAMQHIHYEDENTRYICLGPVNKVLNMLCCWVEDPYSDAFKLHLQRVHDYLWVSEDGMKMQGYNGSQLWDTAFSIQAIASTKLVDSYGPTLRKAHDFVKNSQIQQDCPGDSNVWFRHIHKGAWPFSTRDHGWLISDCTAEGLKASLMLSKLPSEIVGPSLEKNRLCDAVNVLLSLQNDNGGFASYELTRSYPWLELINPAETFGDIVIDYSYVECTSATMEALTLFKKLHPGHRTKEIDTAIGKAANFLEKMQRTDGSWYGCWGVCFTYAGWFGIKGLVAAGRTYNSCIAIRKACDFLLSKELPGGGWGESYLSCQNKVYTNLEGNRPHLVNTAWVLMALIEAGQAERDPAPLHRAARLLINSQLENGDFPQEEIMGVFNKNCMITYAAYRNIFPIWALGEYCHRVLTE

SEQ ID NO: 260 - protein, 757 aa, Solanum tuberosum
MWKLKVAEGGSPWLRTLNGHIGRQVWEFDPNLGSPKDLEEIEKFRAEFYKNRFETKHSSDLLMRYQFSKENPVGTILPRVQVKDIGDITEDNVATTLRRAISFYSTLQAHDGHWAADCGGPMFLLPGLVIALSVTGALNAVLSEEHKREICRYLYNHQNCDGGWGLHIESHSTMFGSVLSYVTLRLLGEKANGGEGAMEKGRKWILDHGTATAITSWGKMWLSVLGLFDWSGNNPLPPEMWLLPYILPFHPGRMWCHCRMVYLPMSYLYGKRFVGPITPTVLSLRKELFTVPYHKINWNKARNECAKEDLYYPHPLLQDILWTSLDKLIEPLFMHWPGKKLREKALSTVMDHIHYEDENTRYICLGPVNKVLNMLCCWVEDSSSEAFKLHLPRLYDYLWIAEDGMKIQGYNGSQSWDTSFAIQAIISTNLVEEYGPTLRKAHKFMKNSQVLDDCPGNLDFWYRHISKGAWPFSTADHGWPISDCTAEGLKACLLLSKLPVEIVGEPLKANRLYDAVNVMLSLQNPDGGIGTYELSRSYPWLEIINPAETFGDIVIDYPYVECTSAIIQALAAFKKLYPGYRKEDVERCIEKGAAFIEKIQEADGSWYGCWGVCFTYGTWFGVKGLLDAGRNFNNSYNIRKACDFLLSKQVVSGGWGESYLSCQNKVYTNLKGNKSHSVCTAWAMLALIEAGQGERDPTPLHRAAKVLINSQLENGDFPQQEISGVFNKNCMISYSAYRNIFPIWALGQYQSQLLNPQ

SEQ ID NO: 261 - protein, 768 aa, Zea mays
MWKLKVAAEGGGGPLLRSTNRFVGRTVWEFEPDLGTPEQRAEVEKARRDFSDHRFQRRHSADVLMRMQMQQYSKGTPLKLDLPAVKKLGEDEDVTEEAVSTSLKRAINRVSALQAHDGHWPGDCSGPLFLLPGLIITLYVTGALNAVLSSEHQREIRRYLYNHQNEDGGWGLHMEGHSAMLGTTLNYVALRLIGEGPDSGGDDGAAMERGRNWILQRGGATYTTSWGKFWLTVLGVYDWSGNNPLPPEMWLLPYHLPFHPGRMWCHCRAVYLPMSYVYGKRFVGRITPLVLELRNELYGDPYSLIDWNKARNQCAKEDLYYPHSFLQDVLWATLHKFVEPVMMHWPGIKFREIALRTAMRHIHYEDESTRYINLGPVNKVLNMLACWIEDPNSEAFKLHVPRIYDYLWLAEDGMKMKGYNGSQLWDAGLTVLAIVNTDLIEEFGPTLKLAHAFVKNSQIIDNCLEDLNQWYRHMSKGGWPFSTADHGWCVSDCTATGLEATLLLSTISPQIVGEAMEVGRVYDGVNCLISLMNNNGGFATFELTRSYAWLEHINPSETFGGIMIDYPYVECTSSSIQALALFKKLYPRHRTEEIDSCISKGANFIESMQRNDGSWYGSWGVCFTYATWFAVFGLACAGRTFEDSPAIKKACEFLLSKELPSGGWGESYLSCQDKVYTNLEGMRPHAVNTSWAMLALIRVGQAERDPAPLHRAARVLINLQSEDGEFPQQEIIGVFNQNCMIGYSQYRNIFPIWALGEYRTKVHVPRKK

SEQ ID NO: 262 - protein, 757 aa, Unknown
  Tarenaya hassleriana
MWRLKFAEGGSPWLRTTNNHVGRQVWEFDPRLGTPEELAEIEEARKSFAENRFVHKHSSDLLMRLQFSRENPVRQVLPQVEVKDTDDISKEAVKSTLERALSFYSAVQTSDGNWASDLGGPMFLLPGLVIALSITGALNAVLSEQHKQEMCRYLYNHQNEDGGWGLHIEGPSTMFGSVLNYVTMRLLGEGPNDGDGAMEKGRDWILNHGGATYITSWGKMWLTVLGVFEWSGNNPLPPEIWLLPYILPIHPGRMWCHCRMVYLPMSYLYGKRFVGPITPTVLSLRKELFTVPYHEVDWNKARNLCAKEDLYYPHPVVQDILWASLHKVVEPILMRWPVTKLREKALRTAIEHIHYEDENTRYICLGPVNKVLNLLCCWVEDPYSDAFKLHLQRVHDYLWVAEDGMKMQGYNGSQLWDTAFSIQAIFATNFVEEYGDVLKKANSYIKDSQIQEDCPGDPNVWFRHIHKGAWPFSTRDHGWLISDCTAEGLKASLMLSKLPSTMVGEPLEANRLCDAVNVLLSLQNDNGGFASYELTRSYPWLELINPAETFGDIVIDYPYVECTSATMEALTLFKKLHPGHRTKEIDQCIKKAAKFLEKMQRADGSWYGCWGVCFTYAGWFGIKGLVAAGRTYNSCLAIRKACEFLLSKELPGGGWGESYLSCQNKVYTNLEGNKPHLVNTAWVLMALIEAGQHERDPKPLHRAARYLINSQLENGDFPQQEIMGVFNKNCMITYAAYRNIFPIWALGEYRSQVLQAA

SEQ ID NO: 263 - protein, 663 aa, Gossypium hirsutum
MDRQSFRDNRFHRKQSSDLFLAIQFAEEKQSVTNLPQTKLEEFEDVKKEAVKSTLERALSFYSAVQTSDGNWASDLGGPMFLLPGLVITLYVTGALNTVLSKEHQYEICRYLYNHQNRDGGWGLHIEGPSTMFGTVLNYVSLRLLGEGAEGGEGAIEKARRMWCHCRMVYLPMSFLYGKKFVGPITPTILSLRKELYTVPYHEVDWNKARNACAKEDLYYPHPLVQDILWASLHYLYEPMLKYWPCKSLREKALQIVMQHIHYEDENTRYICLGPVNKVLNMLCCWVEDPYSESFKLHLPRILDYLWIAEDGMKMQGYNGSQLWDTAFAIQAIISTGLADEYGSVLRKAHDFLKDSQIQEDCPGDPNVWFRHIHKGAWPFSTRDHGWLISDCTAEGLKASLMLSKLPSTMVGEPLEVNRLCDAVNVLLSLQNDNGGFASYELTRSYPWLELINPAETFGDIVIDYPYVECTSATMEALTLFKKLHPGHRTKEIDIGRAVEFLEKMQRADGSWYGCWGVCFTYAGWFGIKGLVAAGRTYNSCLAIRKACEFLLSKELPGGGWGESYLSCQNKVYTNLEGNKPHLVNTAWVLMALIEAGQAERDPTPLHRAAKILINSQMEDGDFPQEEIMGVFNKNCMISYSAYRNIFPIWALGEYHCRVLQAP

SEQ ID NO: 264 - DNA, 1563 bp, Artificial Sequence
  Synthetic
atggaaatgtcctcaagtgtcgcagccacaatcagtatctggatggtcgtcgtatgtatcgtaggtgtaggttggagagtcgtaaattgggtttggttgctgccaaagaaattggaaaagagattgagagaacaaggtttggccggtaattcttacagattgttgttcggtgacttgaaggaaagagctgcaatggaagaacaagcaaattcaaagcctataaacttctcccatgacatcggtccaagagttttcccttcaatgtacaagaccatccaaaactacggtaaaaactcctacatgtggttaggtccataccctagagtccacatcatggatccacaacaattgaagaccgtttttactttggtctacgacattcaaaagccaaatttgaaccctttgattaaattcttgttagatggtatcgttacacatgaaggtgaaaagtgggctaagcacagaaagattattaacccagcattccatttggaaaagttgaaggatatgatacctgctttctttcactcatgtaatgaaatcgtcaacgaatgggaaagattgatttcaaaagaaggttcctgcgaattggatgtaatgccttatttgcaaaatttggccgctgacgccatttcaagaaccgcttttggttcttcatacgaagaaggtaaaatgatcttccaattgttgaaggaattgactgatttggttgtcaaggtagcttttggtgtttatattccaggttggagattcttgcctacaaagagtaacaacaaaatgaaggaaattaatagaaaaatcaagtctttgttgttgggtatcattaacaagagacaaaaggcaatggaagaaggtgaagccggtcaatctgatttgttgggtatattaatggaaagtaattctaacgaaatccaaggtgaaggtaataacaaggaagatggcatgtctattgaagacgtcatcgaagagtgtaaggtattttatataggtggtcaagaaactacagcaagattattgatctggactatgatattgttgtccagtcatacagaatggcaagaaagagccagaaccgaagtcttgaaggtatttggtaataagaaaccagatttcgacggtttgtcaagattgaaggtagttactatgatcttgaacgaagttttaagattgtacccacctgcttccatgttgacaagaatcatccaaaaggaaacaagagttggtaaattaaccttgccagcaggtgttatcttgataatgcctatcatcttgatacatagagatcacgacttgtggggtgaagatgctaacgagtttaaaccagaaagattcagtaaaggtgtttctaaggcagccaaagtccaaccagcctttttcccttttggttggggtcctagaatttgcatgggtcaaaacttcgctatgatcgaagctaagatggcattgagtttgatcttgcaaagattttctttcgaattgtcttcatcctacgttcatgcaccaactgtcgtcttcactacacaaccacaacacggtgcccacatcgttttgagaaagttataa

SEQ ID NO: 265 - DNA, 1422 bp, Artificial Sequence
  Synthetic
atgtggactgtcgtgctcggtttggcgacgctgtttgtcgcctactacatccattggattaacaaatggagagattccaagttcaacggagttctgccgccgggcaccatgggtttgccgctcatcggagagacgattcaactgagtcgacccagtgactccctcgacgttcaccctttcatccagaaaaaagttgaaagatacgggccgatcttcaaaacatgtctggccggaaggccggtggtggtgtcggcggacgcagagttcaacaactacataatgctgcaggaaggaagagcagtggaaatgtggtatttggatacgctctccaaatttttcggcctcgacaccgagtggctcaaagctctgggcctcatccacaagtacatcagaagcattactctcaatcacttcggcgccgaggccctgcgggagagatttcttccttttattgaagcatcctccatggaagcccttcactcctggtctactcaacctagcgtcgaagtcaaaaatgcctccgctctcatggtttttaggacctcggtgaataagatgttcggtgaggatgcgaagaagctatcgggaaatatccctgggaagttcacgaagcttctaggaggatttctcagtttaccactgaattttcccggcaccacctaccacaaatgcttgaaggatatgaaggaaatccagaagaagctaagagaggttgtagacgatagattggctaatgtgggccctgatgtggaagatttcttggggcaagcccttaaagataaggaatcagagaagttcatttcagaggagttcatcatccaactgttgttttctatcagttttgctagctttgagtccatctccaccactcttactttgattctcaagctccttgatgaacacccagaagtagtgaaagagttggaagctgaacacgaggcgattcgaaaagctagagcagatccagatggaccaattacttgggaagaatacaaatccatgacttttacattacaagtcatcaatgaaaccctaaggttggggagtgtcacacctgccttgttgaggaaaacagttaaagatcttcaagtaaaaggatacataatcccggaaggatggacaataatgcttgtcaccgcttcacgtcacagagacccaaaagtctataaggaccctcatatcttcaatccatggcgttggaaggacttggactcaattaccatccaaaagaacttcatgccttttgggggaggcttaaggcattgtgctggtgctgagtactctaaagtctacttgtgcaccttcttgcacatcctctgtaccaaataccgatggaccaaacttgggggaggaaggattgcaagagctcatatattgagttttgaagatgggttacatgtgaagttcacacccaaggaatga

SEQ ID NO: 266 - DNA, 2106 bp, Artificial Sequence
  Synthetic
atgaaggtgtcgccttttgagttcatgagtgccataattaaaggcagaatggacccgagcaattcatcttttgaatccacaggagaagtagcatctgtcatctttgagaaccgagaattggttgcgattttaaccacgtcaatagctgttatgattgggtgtttcgtggttcttatgtggcgtagggctggttccagaaaagtcaagaatgtcgaactacccaaaccactgatcgttcacgaaccagagcctgaagtagaagatggtaagaaaaaggtaagcatcttctttggtactcagacaggaactgccgagggcttcgcaaaagctttggcagatgaagctaaggcgcgctatgaaaaagccacttttagagttgtcgacctcgatgattacgcggctgacgatgaccaatatgaagagaaattaaaaaacgagtctttcgcagtatttctattggcaacatacggtgatggtgaaccaaccgataatgctgcaaggttctataagtggtttgccgaagggaaagagcgtggcgaatggttacaaaacttacattacgctgtttttggattgggtaatcggcagtatgaacattttaataaaattgcaaaggtggccgatgagcttttagaagctcaaggtgggaacagactcgtaaaagttggcctgggggatgacgatcaatgcatagaagacgatttctcagcttggagagaaagtttgtggcccgaacttgacatgctcttaagagatgaagatgatgctacaactgttacgaccccttacactgctgccgtcttggagtatcgagtggtgttccacgatagcgcagatgtcgctgcggaggacaagtcttggattaatgccaacggtcatgctgttcacgacgctcaacatcctttccgctctaatgtagttgtgagaaaagaactgcatacatccgcctctgatagaagttgttcgcatttagaatttaacatatcaggctctgcactaaattatgagactggagatcatgtaggtgtttactgcgaaaaccttacagaaaccgtagatgaagcattgaatttgctaggtctttccccggaaacctatttttcaatctatactgataacgaggacggaacaccactaggaggttcctcactaccccctccatttcccagctgtacgctaaggacggcattaacaaggtacgcggacttgttgaatagtccaaagaagagtgcacttctggctttagccgctcacgcatccaatccagttgaagcggatcgtttaagatacctcgcttccccagcagggaaagatgaatatgcccaatctgtgattggtagccagaaaagtttactcgaggtcatggcagagtttccctcagcgaagcctcctttgggcgttttctttgctgcggttgcacctcgactccaaccgcgtttctacagtatttcctctagtccacggatggcaccatctcgtatccatgttacttgtgcgttggtgtacgataagatgccgactggccgcatacacaaaggtgtctgctcaacttggatgaagaatagtgtaccaatggaaaaatctcatgagtgttcgtgggcaccaatattcgttaggcaatcaaattttaagcttccagctgaatccaaagtcccaattatcatggttggccctgggaccggtctagcaccttttagaggatttctacaagaaagactagccttaaaggaatctggtgtggaattgggcccgtctattcttttcttcggatgcagaaacagaagaatggattatatttatgaagatgagttaaacaattttgttgaaacaggggctctttcagaattagtaattgccttttcaagggaaggtcctaccaaagaatacgttcagcataaaatggccgagaaagcttcagacatctggaatttgatcagtgaaggtgcttatttgtacgtatgtggcgatgctaaaggtatggctaaggatgtgcataggacgcttcacactataatgcaagaacagggtagtttagacagttcgaaggccgaatctatggtgaagaacttgcaaatgaatggtagatatttgcgtgatgtgtggtaa

SEQ ID NO: 267 - DNA, 2079 bp, Artificial Sequence
  Synthetic
atgacctctgcattgtatgcttctgatcttttcaaacaattaaagagtataatgggtactgactccttgtctgatgatgtagttttggtaatagctactacatctttagctctagtcgctggttttgtggtcttgctttggaagaagactactgctgatagatccggtgaattgaaacctctgatgattcctaaatctttgatggctaaagatgaagacgatgatttggacctgggctctggtaagacaagagtttctattttttttggtactcaaactggtactgccgagggttttgctaaggctttgtctgaggaaattaaagctagatatgaaaaggccgcagttaaggtgattgatttggatgactatgctgctgatgatgatcaatacgaagaaaaattgaagaaagaaactttggcattcttctgtgtggctacttacggtgatggtgaaccaactgacaacgctgctagattttataaatggttcactgaggaaaatgaaagagatattaagttacaacaattggcttatggtgtttttgccctaggaaatagacaatacgagcattttaataaaatcggtatcgttttggacgaggaactatgtaagaaaggtgctaaaagattaattgaagttggtttaggtgatgacgatcaatcaattgaagatgactttaacgcttggaaagagtctttgtggtctgagttggataaactgttgaaggatgaagatgacaaatcagtagcaacaccatatactgctgttataccagaatatagagttgttactcatgatccaagatttactactcagaaatctatggagtctaatgttgctaacggtaatactactattgatattcatcatccatgcagagtagacgttgccgttcaaaaagaattgcatacccatgagtccgatagatcttgtatccatcttgagttcgatatttctaggactggtattacctatgaaactggtgaccatgtgggtgtttatgcagaaaatcatgtcgaaatagttgaagaagctggtaagttgttgggtcattccttggacctggtcttttctatccatgctgacaaagaagatggaagtccattggaatctgctgtccctccaccatttccaggaccatgcactttgggtactggtttggctagatatgcagacttgttgaatccaccaagaaaatcagcattggttgctctggctgcttatgcaaccgagcctagtgaagctgaaaaattgaagcatcttacttctccagatggtaaagatgaatactctcaatggattgttgcttctcaaagaagtttattagaagtaatggcagcatttccatctgctaaaccaccattaggtgttttctttgctgctatcgctccaagattacagccaagatattattcaatatcttcttcaccaagattggctccatctagggttcatgtcacttctgctctagtttacggtccaacaccaactggtagaatccataagggtgtttgttccacttggatgaagaatgctgttccagcagagaaatctcatgaatgctctggtgctccaatttttataagagcttctaactttaaattaccatctaatccatctactccaatagtaatggtaggaccaggtactggtttagcaccatttagaggtttccttcaagaaagaatggctttaaaagaggacggtgaagaactgggttcttctctgttattctttggttgtagaaatagacaaatggactttatttacgaagatgaattgaataattttgttgatcagggagtaatttccgagttgataatggctttttctagggaaggtgctcaaaaagagtacgtccaacataaaatgatggaaaaagctgctcaggtatgggatttaattaaagaagaaggttatttgtatgtatgcggtgacgctaaaggtatggcaagagatgtacatagaactttgcatactatagtgcaagaacaagaaggtgtgtcttctagtgaagctgaggccattgttaagaaactacaaactgaaggtagatatctgagagatgtatggtaa

SEQ ID NO: 268 - DNA, 951 bp, Artificial Sequence
  Synthetic
atggatgaaatcgaacatattaccatcaatacaaatggaatcaaaatgcatattgcgtcagtcggcacaggaccagttgttctcttgctacacggctttccagaattatggtactcttggagacaccaactactttacctgtcctccgttgggtacagagcaatagctccagatttgagaggctatggcgatactgacagtccagctagtcctacctcttatactgctcttcatattgtaggtgacctggtcggcgcattagacgaattgggaatagaaaaggtctttttagtgggtcatgactggggtgctattatcgcatggtacttttgtttgtttagaccagatagaattaaagcacttgtgaatttgtctgtccagtttatcccacgtaacccagcaataccttttatagaaggtttcagaacagcttttggtgatgacttctacatttgtagatttcaagtacctggggaagctgaagaggatttcgcgtctatcgatactgctcaattgtttaaaacttcattatgcaatagaagctcagcccctccttgtttgcctaaagagattggttttagggctatcccaccaccagaaaatctgccatcttggctcacagaggaagatatcaacttctacgcagccaagtttaaacaaactggttttactggtgcccttaactattatagagcattcgacttgacatgggaattaacagccccatggacaggagcccagatccaagttcctgtaaagttcatagttggtgattcagatctcacgtaccatttccctggtgctaaggaatacatccacaacggagggtttaaaagagatgtgccactattagaggaagttgttgtggtaaaagatgcctgccacttcattaaccaagagcgaccacaagagattaatgctcatattcatgacttcatcaataagttctaa

SEQ ID NO: 269 - DNA, 1016 bp, Artificial Sequence
  Synthetic
atgaaagtaagaatttttgaaaattcgaattcagacgcgattgaacatagaaccgtaagtgttaatggtatcaatatgcatgtggcagaaaagggagagggacctgtcgtgttgttgcttcatggtttcccagaattgtggtacagttggagacatcaaatattggctctttcctctttaggttacagagctgtcgcaccagacttacgaggctacggggatacagatgccccagggtcaatttcatcatacacatgctttcacatcgtaggagatctcgtggctctagttgagtctctgggtatggacagggtttttgttgtagcccacgattggggtgccatgatcgcttggtgtttgtgtctgtttagacctgaaatggttaaagcttttgtttgtctctccgtcccattcagacagagaaaccctaagatgaaaccagttcaaagtatgagagcctttttcggcgatgattactatatttgcagatttcaaaatcctggggaaatcgaagaggagatggctcaagtgggtgcaagggaagtcttaagaggaattctaacatctcgtcgtcctggaccaccaatcttaccaaaagggcaagcttttagagcaagaccaggagcatccactgcattgccatcttggctatctgaaaaagatctgtcatttttcgcttctaagtatgatcaaaagggctttacaggcccactaaactactacagagccatggatcttaattgggaattgactgcgtcatggactggtgtccaagttaaagtacctgtcaaatacatcgtgggtgacgttgacatggtttttacgactcctggtgtaaaggaatatgtcaacggcggtggtttcaaaaaggacgttccatttttacaggaagtggtaatcatggaaggcgttggtcatttcattaatcaggaaaaacctgaggagatttcatctcatatacacgatttcataagcaaattcgagctcttaattaacaattcttcgccagaggttaa

SEQ ID NO: 270 - DNA, 951 bp, Artificial Sequence
  Synthetic
atggaccagatcgaacacattacgataaataccaacggaattaagatgcatatagcgagtgtgggtacagggccagtcgttcttctactgcatggtttccctgagttgtggtactcctggagacatcaactcttatatttgtcttcggttggatatcgcgctattgcaccggatttaaggggctacggtgatactgactcacccgccagccctacttcttatacagctttacacatcgtaggcgatctggtaggtgcattggatgaactaggaatagaaaaagtttttctagtgggtcatgactggggcgccattattgcttggtatttttgccttttccgtccagatagaatcaaagcgttagttaatttgtccgtccaatttattccacgaaaccctgcaatccccttcattgaagggtttagaacagccttcggtgacgatttttacatgtgtagatttcaagtcccaggcgaggctgaagaggattttgcctctatagatactgctcagctgttcaagaccagtctttgtaataggtcatcggctcctccatgtttgcccaaagaaatcggtttccgggcaattccaccgcctgaaaacttaccaagctggttgaccgaggaagacattaactactatgcagcgaagtttaaacaaacgggtttcactggtgctctcaattattaccgtgcatttgatttaacatgggagttaacagccccctggactggtgctcagatacaagtgccggttaagttcatagtaggggattcagacttgacatatcattttccaggagccaaagaatatatacacaatggaggttttaaaaaagatgtacctcttttggaagaagtagttgtggtgaaggatgcatgccatttcatcaaccaagaaaggccacaagaaattaatgctcacatccatgactttatcaataaattctaa

SEQ ID NO: 271 - DNA, 951 bp, Artificial Sequence
  Synthetic
atggaaaagattgaacacaccactatttctaccaatggtatcaacatgcatgttgcctctattggttctggtccagctgtcttgttcttgcacggtttcccagaattgtggtattcttggagacaccaattattattcttgtcttccatgggttacagagctatcgctccagacttaagaggttttggtgacaccgacgctccaccatctccatcttcttacaccgctcaccacattgtcggtgacttggtcggtttgttagaccaattgggtattgaccaagtttttttggttggtcacgactggggtgctatgatggcctggtacttttgtttgttccgtccagatagagttaaggctttggtcaatttatctgtccacttcttacgtagacacccatctatcaaatttgttgatggtttcagagccttattaggtgatgatttttacttctgtcaattccaagaaccaggtgtcgctgaagccgacttcggttctgtcgatgttgctaccatgttgaagaaattcttgaccatgagagatccaagacctccaatgattcctaaggaaaagggtttcagagccttggaaactccagatccattgccagcctggttaactgaagaagacattgactacttcgccggtaagtttcgtaagaccggttttaccggtggttttaattactacagagccttcaacttgacttgggagttgaccgctccatggtctggttctgaaatcaaggtcgctgccaagttcattgttggtgatttagacttggtttatcacttccctggtgccaaggagtatatccatggtggtggtttcaaaaaggacgtccctttgttggaggaagttgttgttgttgatggtgctgctcacttcatcaaccaagaaagaccagctgaaatttcttccttgatttacgactttatcaagaagttctaa

SEQ ID NO: 272 - DNA, 945 bp, Artificial Sequence
  Synthetic
atggagaagattgaacactctactatcgctactaatggtatcaatatgcacgttgcctctgctggttctggtccagctgttttgtttttgcacggtttcccagaattatggtattcctggagacaccaattgttgtacttgtcttctttgggttacagagctattgctccagatttgagaggtttcggtgacaccgatgctccaccatctccatcctcctacaccgcccaccacatcgttggtgatttggtcggtttgttggatcaattaggtgtcgatcaagtctttttggttggtcatgattggggtgctatgatggcctggtacttctgtttgttccgtccagacagagtcaaggccttagttaatttatctgtccacttcaccccacgtaacccagctatctctccattagatggtttccgtttgatgttgggtgatgatttctacgtttgtaagtttcaagaaccaggtgtcgctgaagccgatttcggttctgttgatactgccactatgtttaaaaagttcttgaccatgagagatccacgtccacctattattccaaacggtttcagatccttggccaccccagaagctttgccatcctggttgactgaagaggatatcgattactttgctgccaaattcgctaagactggttttactggtggtttcaactactacagagctatcgacttgacctgggagttgactgctccatggtccggttctgaaatcaaggttccaactaagtttattgttggtgacttagacttggtttaccatttcccaggtgttaaggaatacattcacggtggtggtttcaagaaggacgttccattcttggaagaagttgtcgtcatggaaggtgctgctcattttatcaaccaagaaaaagctgacgaaattaattctttgatctatgacttcattaaacaattctag

SEQ ID NO: 273 - DNA, 951 bp, Artificial Sequence
  Synthetic
atggaaaacatcgaacacaccactgtccaaactaacggtatcaagatgcacgtcgctgctattggtactggtccaccagttttgttgttgcatggtttcccagaattgtggtattcttggagacaccaattgttgtacttgtcttctgctggttacagagctatcgctccagacttgagaggttacggtgataccgacgctccaccttccccatcttcctataccgctttacacattgtcggtgatttggtcggtttgttggacgtcttgggtatcgaaaaagtcttcttaatcggtcacgactggggtgccatcatcgcctggtacttctgtttattcagacctgatagaatcaaagctttggttaacttgtctgttcaattcttcccaagaaacccaaccaccccatttgttaagggtttcagagccgtcttgggtgatcaattttacatggttagattccaagaaccaggtaaagctgaagaagaattcgcttccgttgatattagagaattcttcaagaatgttttgtccaacagagatccacaagctccatatttgccaaatgaagttaagttcgaaggtgtcccaccaccagctttggctccatggttgaccccagaagatatcgatgtctacgctgacaaattcgctgaaactggtttcactggtggtttgaactactacagagcctttgacagaacctgggaattaactgctccatggaccggtgcccgtattggtgtcccagtcaagttcattgtcggtgatttggacttgacttaccactttccaggtgctcaaaaatacattcacggtgaaggtttcaagaaggctgtcccaggtttggaagaagttgtcgttatggaggatacctctcacttcattaaccaagaaagaccacacgaaattaattctcacatccacgatttcttctctaagttctgttaa

SEQ ID NO: 274 - DNA, 951 bp, Artificial Sequence
  Synthetic
atggatcaaattgaacacatcactattaacaccaacggtatcaaaatgcatatcgcctctgttggtactggtcctgttgttttgttgttgcatggtttcccagaattgtggtactcttggcgtcatcaattgttgtatttgtcctctgtcggttacagagctattgctccagatttaagaggttacggtgatactgactctccagcctctccaacttcttataccgctttgcatatcgttggtgacttggtcggtgctttggatgaattgggtattgaaaaggtcttcttggtcggtcatgattgggctgccatcatcgcttggtacttttgtttgtttagaccagatcgtattaaagctttagttaatttgtctgttcaattcatcccaagaaacccagctatcccatttattgaaggtttcagaaccgcttttggtgatgatttctacatgtgtagattccaagttccaggtgaagctgaagaagactttgcttctattgatactgctcaattgttcaaaacctccttgtgtaacagatcctccgctccaccatgcttgccaaaagaaatcggtttcagagctattccaccaccagaaaatttgccatcttggttgaccgaggaagacattaattactacgctgctaagttcaagcaaaccggtttcactggtgctttaaactactatagagctttcgatttgacctgggaattaactgctccatggaccggtgctcaaattcaagtcccagtcaagttcattgttggtgattctgacttgacttaccattttccaggtgctaaggaatacatccacaacggtggtttcaagaaggacgttccattgttggaagaagttgttgttgtcaaggacgcttgtcacttcatcaaccaagaaagaccacaagaaattaacgctcacattcatgactttattaacaagttctaa

SEQ ID NO: 275 - DNA, 942 bp, Artificial Sequence
  Synthetic
atggagaagatcgaacactcaacgattgccaccaacggaataaatatgcatgtggcgagcgcaggtagtgggccagctgttcttttcctgcatggttttcctgaattgtggtactcttggagacatcaactattatatctctcctcgttaggatatcgcgctattgcaccggatttgaggggctttggtgacacagatgcccccccatctccttcatcttacactgctcaccacatagtaggcgacctggtcggtttgttagatcagctaggagtagatcaagttttcctagtcggtgactggggagcgatgatggcttggtatttttgcttatttagacctgatcgggttaaagctcttgtgaatttgagtgtgcatttcacaccacgtaacccagcaatttcccctttggatggctttcgacttatgttaggggatgacttctacgtatgtaaattccaagagccaggtgttgccgaagcagattttggttcggttgacactgctaccatgttcaagaaatttttgacgatgagagatccgaggcccccaatcattcccaatggttttagaagtcttgcgacacccgaagcactcccttcttggttaactgaagaggatatagactattttgccgcaaagttcgctaagaccggtttcacgggcgggtttaattactatagagccattgatctaacatgggaattaactgccccttggtcaggaagcgaaatcaaagtcccgactaaatttatagtaggggacctggatctcgtttatcatttcccaggtgtcaaagaatatattcatggaggaggttttaaaaaggacgttccatttttggaggaagttgtcgtaatggaaggtgctgctcactttataaaccaggagaaggcagatgagatcaactcattgatctacgattttattaaacaattctaa

SEQ ID NO: 276 - DNA, 951 bp, Artificial Sequence
  Synthetic
atggagaagatcgaacacaccacgatttcaacaaacggaataaatatgcatgtggcgagcattggtagtgggccagccgttcttttcctgcatggttttcctgaattgtggtactcttggagacatcaactattatttctctcctcgatgggatatcgcgctatcgcaccggatttgaggggcttcggtgacactgatgctcccccatctccttcatcttatacagcacaccacatagtaggcgacctagtcggtttattagatcagctgggaattgatcaagttttcctcgtaggtcatgactggggcgccatgatggcttggtacttttgcttgtttcgtccagatagagttaaagcgttagttaatttgtccgtccatttcttacggcgacatcctagtattaaatttgtcgatgggtttagagcactactaggtgacgatttttatttctgtcaatttcaggaaccaggcgtggctgaagccgactttggttctgtggatgttgctactatgttgaagaaattccttaccatgagagatccacgtccccccatgatacctaaggagaaaggcttcagggcattagaaactcctgatccactcccagcctggttgacagaggaagatatagactatttcgcgggaaagtttagaaaaactggatttaccggtggtttcaactactatagagcttttaatcttacgtgggaacttacagcaccgtggtctggttcggaaatcaaggtagctgcaaaatttattgtgggagatcttgatctcgtttaccacttcccgggcgccaaagaatacattcatggaggtggctttaaaaaagacgttcccttattggaagaggtcgtagtggtcgatggggccgctcacttcataaaccaagagaggcctgctgagatttcttcacttatctatgacttcatcaagaagttttaa

SEQ ID NO: 277 - DNA, 1587 bp, Artificial Sequence
  Synthetic
atggtggaccaatgtgcacttgggtggatcctagcgtcagctctgggcttagtaatagccctctgcttctttgtcgctcctcgaagaaaccaccgcggagttgattcgaaagagagagatgaatgtgttcagtctgcggcaaccactaagggtgaatgtaggtttaatgaccgtgatgtagatgttattgtcgtgggtgctggtgttgccggatccgcattggcacatacgttgggcaaagacggtagaagggtgcatgtaattgaaagagacctcacagaaccagatcggatagttggggagttacttcaaccgggtggttacttaaagctaatcgagttaggattgcaagattgcgtggaagaaattgatgctcagagagtatatggctatgccttgttcaaagatggaaaaaatacacgtttgagctacccattagagaactttcacagtgacgtttctggtcgatcattccataatggtagatttattcaacgtatgagagaaaaggctgcgtccctacccaacgtcaggctggaacaaggaactgttacctcgctcttggaggaaaaaggcactatcaagggtgtccaatataaatcaaagaatggggaagaaaaaacagcatacgctccgctcactatagtgtgtgacggttgtttctctaacttacgccgaagtctgtgcaatcctatggtcgatgttccaagctattttgtaggcttggtgttggaaaattgcgagctgccattcgctaaccacggacatgtaattttaggcgatccttctcccattcttttttaccagatttccaggaccgaaataagatgtttggttgatgtccctggtcaaaaagttccatcaatagcaaatggcgagatggaaaagtatctgaaaacagtggtagctcctcaggttcctccacaaatctatgatagttttattgcggccatagacaagggtaacatcaggacgatgcccaatagatctatgccagctgccccacatcctacgccgggtgcccttctaatgggggatgcatttaacatgagacatcccctgacaggaggtggtatgaccgtggcattgagcgatattgtagttttacgtaatcttttaaaacctctcaaggacctgtcagatgcaagtactctgtgcaagtatttagaaagtttctacacccttagaaaaccagttgcttcaactattaacacgttggccggggctctatataaagtattttgtgcctctccggaccaggctaggaaagaaatgcgtcaagcttgtttcgattatttatccttgggaggcatattttcaaatggccctgtatcgctattaagcggactaaacccaagaccactatctctagtcctccacttctttgctgtggcaatatacggtgttggtcgcttgctacttccatttccttctgtcaaggggatctggattggagcgcgtttaatctatagcgcgagtggtattatttttcccattataagagctgagggtgttagacagatgtttttccctgcaacagttcctgcctactataggtccccacccgtgttcaaacccatagtttaa

SEQ ID NO: 278 - DNA, 1575 bp, Artificial Sequence
  Synthetic
atggtggaccaatgtgcacttgggtggatcctagcgtcagttctgggcgctgccgcactctactttttgttcggacgaaaaaatggtggtgtatcgaacgaaaggcgccatgagtccataaagaatattgctactaccaacggtgaatataaaagctctaattccgatggggatattataatcgtcggcgcaggagttgctggtagtgccttagcttatacgttgggtaaggacggaagaagagtgcacgtcattgagcgtgatttgacagaaccggatagaatcgtgggggaattattgcagcccggcggttacttaaaactaactgagttaggtcttgaagactgcgttgatgatattgacgcacaaagggtatatggttacgctttatttaaggatggtaaagatacacggctatcttatccattagaaaagttccattcagacgtagccggaaggtcttttcacaacggcagattcatccaaagaatgcgggaaaaagcggctagtttgccaaaagtttcacttgagcagggtaccgtaacttcgctgcttgaagaaaatggcattataaagggcgtccaatacaaaacaaaaacaggtcaagaaatgaccgcctatgcacctctcactattgtttgtgacggatgcttttctaacctgcgtagatccttgtgtaatcctaaggttgatgtaccatcatgctttgtgggcttagttcttgagaactgtgatctaccctacgctaatcatgggcatgtgatactggctgaccctagtccaatattgttctatcgaatttcttcaacggagatcagatgtttagtcgacgttcccggacaaaaagttccttcgatctctaatggtgaaatggcgaattacctgaagaacgtagtcgccccacagataccaagtcagttgtatgatagctttgttgcagcaattgataaaggaaatattaggactatgccgaaccgtagcatgccggccgatccttatcccactccgggtgctttattgatgggtgacgcgtttaatatgagacacccattgacaggcggaggtatgaccgtcgcgctgagtgatgttgtcgtgctaagagacctattaaaaccattacgcgatttaaacgatgctcctacactgtcaaagtaccttgaagcattctacacgctacgaaaaccagtagccagtaccatcaacacattggctggtgcattgtataaggtgttttgcgcatctccagatcaagcacgtaaagaaatgagacaggcatgtttcgattatttgtctcttggtggtattttttccaatggacctgtatcactactctcagggttgaatccaaggccaattagcctagtactacatttctttgccgttgccatctacggcgtaggtcgtctattaataccgtttccttctcctaagagagtctggatcggcgctagaattataagcggcgcttcggcaattatcttccctataataaaggctgaaggagttagacaaatgttctttccggctactgtggcggcttattatcgtgcaccaagagttgtcaagggtaggtaa

SEQ ID NO: 279 - DNA, 1536 bp, Artificial Sequence
  Synthetic
atggacggggtaattgatatgcagaccatacccctacgtacggccatcgcaattggaggcactgcggttgctcttgtcgtggctttgtacttctggtttctccgtagctatgcatctccttcccaccattcaaatcatttaccgcctgttccagaagtaccaggtgtgccagttttaggtaacctgttgcaattgaaagagaagaaaccctatatgacatttactaagtgggccgaaatgtacggtcctatctattcgattcgcacaggagctacatcaatggtcgttgtaagtagtaatgagatagcgaaagaagtggttgtgactaggttcccatctatctcaactagaaaactgtcctatgccttgaaggtcttaaccgaagataaatctatggtcgcaatgagcgattaccatgactaccacaaaacagttaagcgacatattttaacggctgttctaggcccaaacgcacaaaagaaatttagagctcacagagataccatgatggagaatgtaagcaacgaattgcatgctttctttgaaaagaatcctaatcaggaagtcaaccttagaaaaatatttcaatcccaacttttcggtttagctatgaaacaggcattagggaaggatgtggaatctatttatgtaaaggacctggaaactaccatgaaaagggaagagatattcgaagttcttgttgttgaccccatgatgggagccattgaagtcgattggcgagattttttcccgtatctcaaatgggtgccaaataaatcttttgaaaatataatccataggatgtacacgagaagagaggccgttatgaaagcgttgattcaagagcacaagaaaaggatcgcttcaggtgagaacctaaattcctacatagattatctcttgagtgaagctcaaacattaactgacaaacagttattaatgtcgttgtgggaacctattatagaatcgtctgatactaccatggtaacaacagaatgggcaatgtatgaacttgcgaagaaccctaatatgcaagatcgtctgtacgaagagattcaatcggtttgtggaagcgagaagattacagaagaaaacttatcacaactcccatatctatatgccgttttccaggaaactctgagaaagcattgccctgtgccgatcatgccacttagatacgtacatgagaacactgttttgggtggttaccacgtaccagcaggcaccgaagtggcaatcaatatttatggctgtaatatggacaagaaagtgtgggaaaatcccgaagagtggaatccagaacgttttctgtctgaaaaagagagtatggatttgtataaaacgatggcatttggtggaggtaaaagagtttgtgcgggatctctacaagctatggtaattagttgcatcggcatcgggaggttagttcaagattttgaatggaaactaaaagatgacgctgaagaagatgtgaatacattaggtttgactacgcaaaagctacaccctttgttagcactaattaacccgcggaaa

SEQ ID NO: 280 - protein, 520 aa, Unknown
  Siraitia grosvenorii
MEMSSSVAATISIWMVVVCIVGVGWRVVNWVWLRPKKLEKRLREQGLAGNSYRLLFGDLKERAAMEEQANSKPINFSHDIGPRVFPSMYKTIQNYGKNSYMWLGPYPRVHIMDPQQLKTVFTLVYDIQKPNLNPLIKFLLDGIVTHEGEKWAKHRKIINPAFHLEKLKDMIPAFFHSCNEIVNEWERLISKEGSCELDVMPYLQNLAADAISRTAFGSSYEEGKMIFQLLKELTDLVVKVAFGVYIPGWRFLPTKSNNKMKEINRKIKSLLLGIINKRQKAMEEGEAGQSDLLGILMESNSNEIQGEGNNKEDGMSIEDVIEECKVFYIGGQETTARLLIWTMILLSSHTEWQERARTEVLKVFGNKKPDFDGLSRLKVVTMILNEVLRLYPPASMLTRIIQKETRVGKLTLPAGVILIMPIILIHRDHDLWGEDANEFKPERFSKGVSKAAKVQPAFFPFGWGPRICMGQNFAMIEAKMALSLILQRFSFELSSSYVHAPTVVFTTQPQHGAHIVLRKL

SEQ ID NO: 281 - protein, 473 aa, Unknown
  Siraitia grosvenorii
MWTVVLGLATLFVAYYIHWINKWRDSKFNGVLPPGTMGLPLIGETIQLSRPSDSLDVHPFIQKKVERYGPIFKTCLAGRPVVVSADAEFNNYIMLQEGRAVEMWYLDTLSKFFGLDTEWLKALGLIHKYIRSITLNHFGAEALRERFLPFIEASSMEALHSWSTQPSVEVKNASALMVFRTSVNKMFGEDAKKLSGNIPGKFTKLLGGFLSLPLNFPGTTYHKCLKDMKEIQKKLREVVDDRLANVGPDVEDFLGQALKDKESEKFISEEFIIQLLFSISFASFESISTTLTLILKLLDEHPEVVKELEAEHEAIRKARADPDGPITWEEYKSMTFTLQVINETLRLGSVTPALLRKTVKDLQVKGYIIPEGWTIMLVTASRHRDPKVYKDPHIFNPWRWKDLDSITIQKNFMPFGGGLRHCAGAEYSKVYLCTFLHILCTKYRWTKLGGGRIARAHILSFEDGLHVKFTPKE

SEQ ID NO: 282 - protein, 701 aa, Unknown
  Siraitia grosvenorii
MKVSPFEFMSAIIKGRMDPSNSSFESTGEVASVIFENRELVAILTTSIAVMIGCFVVLMWRRAGSRKVKNVELPKPLIVHEPEPEVEDGKKKVSIFFGTQTGTAEGFAKALADEAKARYEKATFRVVDLDDYAADDDQYEEKLKNESFAVFLLATYGDGEPTDNAARFYKWFAEGKERGEWLQNLHYAVFGLGNRQYEHFNKIAKVADELLEAQGGNRLVKVGLGDDDQCIEDDFSAWRESLWPELDMLLRDEDDATTVTTPYTAAVLEYRVVFHDSADVAAEDKSWINANGHAVHDAQHPFRSNVVVRKELHTSASDRSCSHLEFNISGSALNYETGDHVGVYCENLTETVDEALNLLGLSPETYFSIYTDNEDGTPLGGSSLPPPFPSCTLRTALTRYADLLNSPKKSALLALAAHASNPVEADRLRYLASPAGKDEYAQSVIGSQKSLLEVMAEFPSAKPPLGVFFAAVAPRLQPRFYSISSSPRMAPSRIHVTCALVYDKMPTGRIHKGVCSTWMKNSVPMEKSHECSWAPIFVRQSNFKLPAESKVPIIMVGPGTGLAPFRGFLQERLALKESGVELGPSILFFGCRNRRMDYIYEDELNNFVETGALSELVIAFSREGPTKEYVQHKMAEKASDIWNLISEGAYLYVCGDAKGMAKDVHRTLHTIMQEQGSLDSSKAESMVKNLQMNGRYLRDVW

SEQ ID NO: 283 - protein, 692 aa, Arabidopsis thaliana [sequence omitted]

SEQ ID NO: 284 - protein, 316 aa, Unknown
  Siraitia grosvenorii
MDEIEHITINTNGIKMHIASVGTGPVVLLLHGFPELWYSWRHQLLYLSSVGYRAIAPDLRGYGDTDSPASPTSYTALHIVGDLVGALDELGIEKVFLVGHDWGAIIAWYFCLFRPDRIKALVNLSVQFIPRNPAIPFIEGFRTAFGDDFYICRFQVPGEAEEDFASIDTAQLFKTSLCNRSSAPPCLPKEIGFRAIPPPENLPSWLTEEDINFYAAKFKQTGFTGALNYYRAFDLTWELTAPWTGAQIQVPVKFIVGDSDLTYHFPGAKEYIHNGGFKRDVPLLEEVVVVKDACHFINQERPQEINAHIHDFINKF

SEQ ID NO: 285 - protein, 317 aa, Unknown
  Siraitia grosvenorii
MDAIEHRTVSVNGINMHVAEKGEGPVVLLLHGFPELWYSWRHQILALSSLGYRAVAPDLRGYGDTDAPGSISSYTCFHIVGDLVALVESLGMDRVFVVAHDWGAMIAWCLCLFRPEMVKAFVCLSVPFRQRNPKMKPVQSMRAFFGDDYYICRFQNPGEIEEEMAQVGAREVLRGILTSRRPGPPILPKGQAFRARPGASTALPSWLSEKDLSFFASKYDQKGFTGPLNYYRAMDLNWELTASWTGVQVKVPVKYIVGDVDMVFTTPGVKEYVNGGGFKKDVPFLQEVVIMEGVGHFINQEKPEEISSHIHDFISKF

SEQ ID NO: 286 - protein, 316 aa, Unknown
  Siraitia grosvenorii
MDQIEHITINTNGIKMHIASVGTGPVVLLLHGFPELWYSWRHQLLYLSSVGYRAIAPDLRGYGDTDSPASPTSYTALHIVGDLVGALDELGIEKVFLVGHDWGAIIAWYFCLFRPDRIKALVNLSVQFIPRNPAIPFIEGFRTAFGDDFYMCRFQVPGEAEEDFASIDTAQLFKTSLCNRSSAPPCLPKEIGFRAIPPPENLPSWLTEEDINYYAAKFKQTGFTGALNYYRAFDLTWELTAPWTGAQIQVPVKFIVGDSDLTYHFPGAKEYIHNGGFKKDVPLLEEVVVVKDACHFINQERPQEINAHIHDFINKF

SEQ ID NO: 287 - protein, 316 aa, Unknown
  Siraitia grosvenorii
MEKIEHTTISTNGINMHVASIGSGPAVLFLHGFPELWYSWRHQLLFLSSMGYRAIAPDLRGFGDTDAPPSPSSYTAHHIVGDLVGLLDQLGIDQVFLVGHDWGAMMAWYFCLFRPDRVKALVNLSVHFLRRHPSIKFVDGFRALLGDDFYFCQFQEPGVAEADFGSVDVATMLKKFLTMRDPRPPMIPKEKGFRALETPDPLPAWLTEEDIDYFAGKFRKTGFTGGFNYYRAFNLTWELTAPWSGSEIKVAAKFIVGDLDLVYHFPGAKEYIHGGGFKKDVPLLEEVVVVDGAAHFINQERPAEISSLIYDFIKKF

SEQ ID NO: 288 - protein, 314 aa, Unknown
  Siraitia grosvenorii
MEKIEHSTIATNGINMHVASAGSGPAVLFLHGFPELWYSWRHQLLYLSSLGYRAIAPDLRGFGDTDAPPSPSSYTAHHIVGDLVGLLDQLGVDQVFLVGHDWGAMMAWYFCLFRPDRVKALVNLSVHFTPRNPAISPLDGFRLMLGDDFYVCKFQEPGVAEADFGSVDTATMFKKFLTMRDPRPPIIPNGFRSLATPEALPSWLTEEDIDYFAAKFAKTGFTGGFNYYRAIDLTWELTAPWSGSEIKVPTKFIVGDLDLVYHFPGVKEYIHGGGFKKDVPFLEEVVVMEGAAHFINQEKADEINSLIYDFIKQF

SEQ ID NO: 289 - protein, 316 aa, Unknown
  Siraitia grosvenorii
MENIEHTTVQTNGIKMHVAAIGTGPPVLLLHGFPELWYSWRHQLLYLSSAGYRAIAPDLRGYGDTDAPPSPSSYTALHIVGDLVGLLDVLGIEKVFLIGHDWGAIIAWYFCLFRPDRIKALVNLSVQFFPRNPTTPFVKGFRAVLGDQFYMVRFQEPGKAEEEFASVDIREFFKNVLSNRDPQAPYLPNEVKFEGVPPPALAPWLTPEDIDVYADKFAETGFTGGLNYYRAFDRTWELTAPWTGARIGVPVKFIVGDLDLTYHFPGAQKYIHGEGFKKAVPGLEEVVVMEDTSHFINQERPHEINSHIHDFFSKFC

SEQ ID NO: 290 - protein, 316 aa, Unknown
  Siraitia grosvenorii
MDQIEHITINTNGIKMHIASVGTGPVVLLLHGFPELWYSWRHQLLYLSSVGYRAIAPDLRGYGDTDSPASPTSYTALHIVGDLVGALDELGIEKVFLVGHDWAAIIAWYFCLFRPDRIKALVNLSVQFIPRNPAIPFIEGFRTAFGDDFYMCRFQVPGEAEEDFASIDTAQLFKTSLCNRSSAPPCLPKEIGFRAIPPPENLPSWLTEEDINYYAAKFKQTGFTGALNYYRAFDLTWELTAPWTGAQIQVPVKFIVGDSDLTYHFPGAKEYIHNGGFKKDVPLLEEVVVVKDACHFINQERPQEINAHIHDFINKF

SEQ ID NO: 291 - protein, 313 aa, Unknown
  Siraitia grosvenorii
MEKIEHSTIATNGINMHVASAGSGPAVLFLHGFPELWYSWRHQLLYLSSLGYRAIAPDLRGFGDTDAPPSPSSYTAHHIVGDLVGLLDQLGVDQVFLVGDWGAMMAWYFCLFRPDRVKALVNLSVHFTPRNPAISPLDGFRLMLGDDFYVCKFQEPGVAEADFGSVDTATMFKKFLTMRDPRPPIIPNGFRSLATPEALPSWLTEEDIDYFAAKFAKTGFTGGFNYYRAIDLTWELTAPWSGSEIKVPTKFIVGDLDLVYHFPGVKEYIHGGGFKKDVPFLEEVVVMEGAAHFINQEKADEINSLIYDFIKQF

SEQ ID NO: 292 - protein, 316 aa, Unknown; identical to SEQ ID NO: 287
  Siraitia grosvenorii

SEQ ID NO: 293 - protein, 528 aa, Unknown
  Siraitia grosvenorii
MVDQCALGWILASALGLVIALCFFVAPRRNHRGVDSKERDECVQSAATTKGECRFNDRDVDVIVVGAGVAGSALAHTLGKDGRRVHVIERDLTEPDRIVGELLQPGGYLKLIELGLQDCVEEIDAQRVYGYALFKDGKNTRLSYPLENFHSDVSGRSFHNGRFIQRMREKAASLPNVRLEQGTVTSLLEEKGTIKGVQYKSKNGEEKTAYAPLTIVCDGCFSNLRRSLCNPMVDVPSYFVGLVLENCELPFANHGHVILGDPSPILFYQISRTEIRCLVDVPGQKVPSIANGEMEKYLKTVVAPQVPPQIYDSFIAAIDKGNIRTMPNRSMPAAPHPTPGALLMGDAFNMRHPLTGGGMTVALSDIVVLRNLLKPLKDLSDASTLCKYLESFYTLRKPVASTINTLAGALYKVFCASPDQARKEMRQACFDYLSLGGIFSNGPVSLLSGLNPRPLSLVLHFFAVAIYGVGRLLLPFPSVKGIWIGARLIYSASGIIFPIIRAEGVRQMFFPATVPAYYRSPPVFKPIV

SEQ ID NO: 294 - protein, 524 aa, Unknown
  Siraitia grosvenorii
MVDQCALGWILASVLGAAALYFLFGRKNGGVSNERRHESIKNIATTNGEYKSSNSDGDIIIVGAGVAGSALAYTLGKDGRRVHVIERDLTEPDRIVGELLQPGGYLKLTELGLEDCVDDIDAQRVYGYALFKDGKDTRLSYPLEKFHSDVAGRSFHNGRFIQRMREKAASLPKVSLEQGTVTSLLEENGIIKGVQYKTKTGQEMTAYAPLTIVCDGCFSNLRRSLCNPKVDVPSCFVGLVLENCDLPYANHGHVILADPSPILFYRISSTEIRCLVDVPGQKVPSISNGEMANYLKNVVAPQIPSQLYDSFVAAIDKGNIRTMPNRSMPADPYPTPGALLMGDAFNMRHPLTGGGMTVALSDVVVLRDLLKPLRDLNDAPTLSKYLEAFYTLRKPVASTINTLAGALYKVFCASPDQARKEMRQACFDYLSLGGIFSNGPVSLLSGLNPRPISLVLHFFAVAIYGVGRLLIPFPSPKRVWIGARIISGASAIIFPIIKAEGVRQMFFPATVAAYYRAPRVVKGR

SEQ ID NO: 295 - protein, 512 aa, Lactuca sativa
MDGVIDMQTIPLRTAIAIGGTAVALVVALYFWFLRSYASPSHHSNHLPPVPEVPGVPVLGNLLQLKEKKPYMTFTKWAEMYGPIYSIRTGATSMVVVSSNEIAKEVVVTRFPSISTRKLSYALKVLTEDKSMVAMSDYHDYHKTVKRHILTAVLGPNAQKKFRAHRDTMMENVSNELHAFFEKNPNQEVNLRKIFQSQLFGLAMKQALGKDVESIYVKDLETTMKREEIFEVLVVDPMMGAIEVDWRDFFPYLKWVPNKSFENIIHRMYTRREAVMKALIQEHKKRIASGENLNSYIDYLLSEAQTLTDKQLLMSLWEPIIESSDTTMVTTEWAMYELAKNPNMQDRLYEEIQSVCGSEKITEENLSQLPYLYAVFQETLRKHCPVPIMPLRYVHENTVLGGYHVPAGTEVAINIYGCNMDKKVWENPEEWNPERFLSEKESMDLYKTMAFGGGKRVCAGSLQAMVISCIGIGRLVQDFEWKLKDDAEEDVNTLGLTTQKLHPLLALINPRK

SEQ ID NO: 296 - DNA, 1563 bp, Artificial Sequence
  Synthetic
atggaaatgtcctcaagtgtcgcagccacaatcagtatctggatggtcgtcgtatgtatcgtaggtgtaggttggagagtcgtaaattgggtttggttgagaccaaagaaattggaaaagagattgagagaacaaggtttggccggtaattcttacagattgttgttcggtgacttgaaggaaagagctgcaatggaagaacaagcaaattcaaagcctataaacttctcccatgacatcggtccaagagttttcccttcaatgtacaagaccatccaaaactacggtaaaaactcctacatgtggttaggtccataccctagagtccacatcatggatccacaacaattgaagaccgtttttactttggtctacgacattcaaaagccaaatttgaaccctttgattaaattcttgttagatggtatcgttacacatgaaggtgaaaagtgggctaagcacagaaagattattaacccagcattccatttggaaaagttgaaggatatgatacctgctttctttcactcatgtaatgaaatcgtcaacgaatgggaaagattgatttcaaaagaaggttcctgcgaattggatgtaatgccttatttgcaaaatttggccgctgacgccatttcaagaaccgcttttggttcttcatacgaagaaggtaaaatgatcttccaattgttgaaggaattgactgatttggttgtcaaggtagcttttggtgtttatattccaggttggagattcttgcctacaaagagtaacaacaaaatgaaggaaattaatagaaaaatcaagtctttgttgttgggtatcattaacaagagacaaaaggcaatggaagaaggtgaagccggtcaatctgatttgttgggtatattaatggaaagtaattctaacgaaatccaaggtgaaggtaataacaaggaagatggcatgtctattgaagacgtcatcgaagagtgtaaggtattttatataggtggtcaagaaactacagcaagattattgatctggactatgatattgttgtccagtcatacagaatggcaagaaagagccagaaccgaagtcttgaaggtatttggtaataagaaaccagatttcgacggtttgtcaagattgaaggtagttactatgatcttgaacgaagttttaagattgtacccacctgcttccatgttgacaagaatcatccaaaaggaaacaagagttggtaaattaaccttgccagcaggtgttatcttgataatgcctatcatcttgatacatagagatcacgacttgtggggtgaagatgctaacgagtttaaaccagaaagattcagtaaaggtgtttctaaggcagccaaagtccaaccagcctttttcccttttggttggggtcctagaatttgcatgggtcaaaacttcgctatgatcgaagctaagatggcattgagtttgatcttgcaaagattttctttcgaattgtcttcatcctacgttcatgcaccaactgtcgtcttcactacacaaccacaacacggtgcccacatcgttttgagaaagttatga

SEQ ID NO: 297 - DNA, 2079 bp, Artificial Sequence
  Synthetic
atgacctctgcattgtatgcttctgatcttttcaaacaattaaagagtataatgggtactgactccttgtctgatgatgtagttttggtaatagctactacatctttagctctagtcgctggttttgtggtcttgctttggaagaagactactgctgatagatccggtgaattgaaacctctgatgattcctaaatctttgatggctaaagatgaagacgatgatttggacctgggctctggtaagacaagagtttctattttttttggtactcaaactggtactgccgagggttttgctaaggctttgtctgaggaaattaaagctagatatgaaaaggccgcagttaaggtgattgatttggatgactatgctgctgatgatgatcaatacgaagaaaaattgaagaaagaaactttggcattcttctgtgtggctacttacggtgatggtgaaccaactgacaacgctgctagattttataaatggttcactgaggaaaatgaaagagatattaagttacaacaattggcttatggtgtttttgccctaggaaatagacaatacgagcattttaataaaatcggtatcgttttggacgaggaactatgtaagaaaggtgctaaaagattaattgaagttggtttaggtgatgacgatcaatcaattgaagatgactttaacgcttggaaagagtctttgtggtctgagttggataaactgttgaaggatgaagatgacaaatcagtagcaacaccatatactgctgttataccagaatatagagttgttactcatgatccaagatttactactcagaaatctatggagtctaatgttgctaacggtaatactactattgatattcatcatccatgcagagtagacgttgccgttcaaaaagaattgcatacccatgagtccgatagatcttgtatccatcttgagttcgatatttctaggactggtattacctatgaaactggtgaccatgtgggtgtttatgcagaaaatcatgtcgaaatagttgaagaagctggtaagttgttgggtcattccttggacctggtcttttctatccatgctgacaaagaagatggaagtccattggaatctgctgtccctccaccatttccaggaccatgcactttgggtactggtttggctagatatgcagacttgttgaatccaccaagaaaatcagcattggttgctctggctgcttatgcaaccgagcctagtgaagctgaaaaattgaagcatcttacttctccagatggtaaagatgaatactctcaatggattgttgcttctcaaagaagtttattagaagtaatggcagcatttccatctgctaaaccaccattaggtgttttctttgctgctatcgctccaagattacagccaagatattattcaatatcttcttcaccaagattggctccatctagggttcatgtcacttctgctctagtttacggtccaacaccaactggtagaatccataagggtgtttgttccacttggatgaagaatgctgttccagcagagaaatctcatgaatgctctggtgctccaatttttataagagcttctaactttaaattaccatctaatccatctactccaatagtaatggtaggaccaggtactggtttagcaccatttagaggtttccttcaagaaagaatggctttaaaagaggacggtgaagaactgggttcttctctgttattctttggttgtagaaatagacaaatggactttatttacgaagatgaattgaataattttgttgatcagggagtaatttccgagttgataatggctttttctagggaaggtgctcaaaaagagtacgtccaacataaaatgatggaaaaagctgctcaggtatgggatttaattaaagaagaaggttatttgtatgtatgcggtgacgctaaaggtatggcaagagacgtacatagaactttgcatactatagtgcaagaacaagaaggtgtgtcttctagtgaagctgaggccattgttaagaaactacaaactgaaggtagatatctgagagacgtatggtaa

SEQ ID NO: 298 - DNA, 2106 bp, Artificial Sequence; identical to SEQ ID NO: 266
  Synthetic

SEQ ID NO: 299 - DNA, 2280 bp, Artificial Sequence
  Synthetic
atgtggaggcttaaagtaggcgcggaatcagtcggggagaatgacgaaaagtggctgaaaagcattagtaaccacttgggtcgccaggtgtgggaattttgcccagatgcaggtacgcaacaacaactattacaggttcataaggctagaaaagccttccatgatgaccgttttcacagaaagcaatcgtccgatttgttcatcaccatacaatatggaaaagaggttgaaaatggaggtaagacagctggcgtaaaactcaaggagggtgaagaagttagaaaggaggcagtcgaatcttctttggaacgggctttatcgttttactcttcaattcaaacttccgatggtaactgggccagtgacctgggtggtccgatgtttttactacccggcttggttatcgccctttatgtaaccggcgtcctgaatagcgtgctatccaaacatcataggcaggaaatgtgtcgatacgtttataaccaccaaaatgaggatgggggttggggattacatattgaaggaccttcaacaatgttcgggtctgcacttaattatgtcgctttgagactcttaggcgaagacgcaaacgctggtgccatgccaaaagcaagagcgtggatattggatcacggaggtgcgactggtatcacgtcatggggcaaactttggctctcggttttaggagtgtacgagtggagtggcaataatcctctaccacctgaattttggctgtttccttatttcttgccgttccatcccgggcgaatgtggtgtcattgcagaatggtatatttaccaatgagttacctctatggtaagcgttttgtaggtccaattactcctatagttttgtctttacgcaaagaactatacgctgtcccataccatgagatcgattggaacaagtcgcgtaatacatgtgctaaagaagatctttattacccccacccgaaaatgcaggacattctgtgggggtcattgcatcacgtttatgagcccttatttaccagatggccggcgaaaagactaagggaaaaggctttgcaaactgccatgcaacatatacactacgaagatgaaaacacaagatacatttgtttagggcctgtaaataaagtgttgaatttactttgctgttgggtagaagacccatatagcgatgcatttaagctccatttgcagagggttcacgactatttatgggtcgctgaagatggaatgaaaatgcaaggttataatggatctcaattgtgggacacagcatttagcattcaggccattgtctctactaaactcgttgataactacggcccaacgctacggaaggcccatgatttcgtgaaaagcagtcagatacaacaagattgccctggcgatccaaacgtgtggtataggcatatacacaagggtgcttggccattctcaacaagagatcatggttggctgatctccgattgtacagctgagggattaaaggcggcattaatgttgtctaaattaccgagtgaaaccgttggtgagagcttggaaagaaatagactgtgtgatgccgtgaatgtgttgctttccctgcaaaatgacaatggaggtttcgcgtcgtatgaactaactcgatcttatccttggttagaacttatcaaccccgcagaaacctttggggatattgttatcgattatccatacgtggagtgtacttcagcaaccatggaggctttgacactgtttaaaaaacttcatcctggacatcgtactaaggaaattgatacggccatagtacgcgcagctaactttctagaaaatatgcaaagaactgatggtagttggtacggttgctggggcgtttgtttcacttacgctggctggtttggaattaaaggtctagtagctgccggacgtacatataacaattgcttggccattagaaaggcttgtgactttctcttatcaaaagaactacctggtggtgggtggggagagtcttatcttagctgccagaacaaagtatatactaatttggaaggcaacaggccacaccttgttaacacagcatgggtattgatggctctgattgaagctggtcaagctgaacgtgacccaacgcccttacacagagcagcaagactgctgatcaattcacagttagaaaatggtgatttccctcagcaagagatcatgggcgtttttaacaagaattgtatgattacttacgccgcatatcgtaacatatttccgatttgggcattaggggaatactgccatagggtgcttactgaataa

SEQ ID NO: 300 - DNA, 951 bp, Artificial Sequence
  Synthetic
atggatcagatcgagcacattactataaataccaacggcattaaaatgcatatagcgtcagtagggacaggaccagttgtcctgcttctacatggtttccccgaattgtggtactcttggcgtcaccaattgttatatttatcgagtgtgggttatagggcaatcgcccctgacctgagaggttacggcgatacggattccccggcatctccaactagctatacagctctccatattgttggagacttggtgggtgctttagatgaactaggaattgaaaaggtttttctagtcggtcatgactggggcgccataatcgcttggtatttttgccttttccgccctgatcgaattaaagctttggtaaatttatcagttcaatttataccgagaaacccagcaattcctttcatcgaaggttttcgtaccgcgtttggcgacgatttttacatgtgtagattccaggtcccaggagaggcagaggaagattttgcctctatagacactgctcaacttttcaagaccagtctatgtaatagatcctcagcgcccccttgcctcccaaaagaaattgggttcagggccattcccccacctgaaaatttgcctagctggctgacggaggaagatatcaactattacgctgcaaagtttaaacaaacaggtttcactggtgccctcaattactatagagcatttgatcttacttgggaattaacagctccatggactggtgctcaaatacaggttccagtaaaatttatcgtaggagattccgatttgacgtatcattttcccggagcaaaggagtacattcacaacgggggcttcaaaaaagacgtgcctttattggaagaggttgtggtagttaaggatgcatgtcacttcatcaaccaagaaagacctcaagaaattaatgctcatattcatgactttataaataagttctaa

SEQ ID NO: 301 - DNA, 951 bp, Artificial Sequence
  Synthetic
atggagaagattgaacacacaacgatctcgaccaacggtataaatatgcatgtggcatcaattggctctggacccgccgtacttttcttgcatggttttccagaactatggtacagctggaggcaccagttactgtttttaagttccatggggtatagagcgatagctccggacttgcgcggattcggtgatactgatgctccaccttcgcctagttcatataccgcacatcatattgtcggggacttggttggcctattagatcaactcggtatcgatcaagtttttttggtcggacacgactggggtgccatgatggcgtggtacttttgtctgttccgtccagatcgagtgaaagctcttgttaatttatctgttcatttcctaagaagacacccatccattaaatttgtagatgggtttagggcacttttaggagatgacttctatttttgccaatttcaggaacctggcgtggcagaggctgattttggttccgtagacgttgccacaatgttaaagaaattcttgactatgcgggatccaagacccccaatgataccgaaggaaaaaggttttagagctttggaaacacctgatccgctccctgcgtggttaactgaagaagacatcgattacttcgccggtaaatttcgtaagacgggtttcactggaggctttaactattatcgcgctttcaatctgacatgggagctaacagcaccctggtcgggttctgaaataaaggtggcagctaaatttattgtcggagaccttgacttagtttaccattttcctggtgcgaaggagtatattcatggagggggcttcaaaaaagatgtacccttgctagaagaggtcgttgtcgtggatggcgctgcccattttataaatcaagaaagaccagcagagattagctctctaatctacgactttatcaaaaagttctaa

SEQ ID NO: 302 - DNA, 1335 bp, Artificial Sequence
  Synthetic
atgggaaagctattacaattggcattgcatccggtcgagatgaaggcagctttgaagctgaagttttgcagaacaccgctattctccatctatgatcagtccacgtctccatatctcttgcactgtttcgaactgttgaacttgacctccagatcgtttgctgctgtgatcagagagctgcatccagaattgagaaactgtgttactctcttttatttgattttaagggctttggataccatcgaagacgatatgtccatcgaacacgatttgaaaattgacttgttgcgtcacttccacgagaaattgttgttaactaaatggagtttcgacggaaatgcccccgatgtgaaggacagagccgttttgacagatttcgaatcgattcttattgaattccacaaattgaaaccagaatatcaagaagtcatcaaggagatcaccgagaaaatgggtaatggtatggccgactacatcttggatgaaaattacaacttgaatgggttgcaaaccgtccacgactacgacgtgtactgtcactacgtagctggtttggtcggtgatggtttgacccgtttgattgtcattgccaagtttgccaacgaatctttgtattctaatgagcaattgtatgaaagcatgggtcttttcctacaaaaaaccaacatcatcagagactacaatgaagatttggtcgatggtagatccttctggcccaaggaaatctggtcacaatacgctcctcagttgaaggacttcatgaaacctgaaaacgaacaactggggttggactgtataaaccacctcgtcttaaacgcattgagtcatgttatcgatgtgttgacttatttggccagtatccacgagcaatccactttccaattttgtgccattccccaagttatggccattgcaaccttggctttggtattcaacaaccgtgaagtgctacatggcaatgtaaagattcgtaagggtactacctgctatttaattttgaaatcaaggactttgcgtggctgtgtcgagatttttgactattacttacgtgatatcaaatctaaattggctgtgcaagatccaaatttcttaaaattgaacattcaaatctccaagatcgaacaattcatggaagaaatgtaccaggataaattacctcctaacgtgaagccaaatgaaactccaattttcttgaaagttaaagaaagatccagatacgatgatgaattggtcccaacccaacaagaagaagagtacaagttcaatatggttttatctatcatcttgtccgttcttcttgggttttattatatatacactttacacagagcgtga

SEQ ID NO: 303 - DNA, 1491 bp, Artificial Sequence
  Synthetic
atgtctgctgttaacgttgcacctgaattgattaatgccgacaacacaattacctacgatgcgattgtcatcggtgctggtgttatcggtccatgtgttgctactggtctagcaagaaagggtaagaaagttcttatcgtagaacgtgactgggctatgcctgatagaattgttggtgaattgatgcaaccaggtggtgttagagcattgagaagtctgggtatgattcaatctatcaacaacatcgaagcatatcctgttaccggttataccgtctttttcaacggcgaacaagttgatattccatacccttacaaggccgatatccctaaagttgaaaaattgaaggacttggtcaaagatggtaatgacaaggtcttggaagacagcactattcacatcaaggattacgaagatgatgaaagagaaaggggtgttgcttttgttcatggtagattcttgaacaacttgagaaacattactgctcaagagccaaatgttactagagtgcaaggtaactgtattgagatattgaaggatgaaaagaatgaggttgttggtgccaaggttgacattgatggccgtggcaaggtggaattcaaagcccacttgacatttatctgtgacggtatcttttcacgtttcagaaaggaattgcacccagaccatgttccaactgtcggttcttcgtttgtcggtatgtctttgttcaatgctaagaatcctgctcctatgcacggtcacgttattcttggtagtgatcatatgccaatcttggtttaccaaatcagtccagaagaaacaagaatcctttgtgcttacaactctccaaaggtcccagctgatatcaagagttggatgattaaggatgtccaacctttcattccaaagagtctacgtccttcatttgatgaagccgtcagccaaggtaaatttagagctatgccaaactcctacttgccagctagacaaaacgacgtcactggtatgtgtgttatcggtgacgctctaaatatgagacatccattgactggtggtggtatgactgtcggtttgcatgatgttgtcttgttgattaagaaaataggtgacctagacttcagcgaccgtgaaaaggttttggatgaattactagactaccatttcgaaagaaagagttacgattccgttattaacgttttgtcagtggctttgtattctttgttcgctgctgacagcgataacttgaaggcattacaaaaaggttgtttcaaatatttccaaagaggtggcgattgtgtcaacaaacccgttgaatttctgtctggtgtcttgccaaagcctttgcaattgaccagggttttcttcgctgtcgctttttacaccatttacttgaacatggaagaacgtggtttcttgggattaccaatggctttattggaaggtattatgattttgatcacagctattagagtattcaccccatttttgtttggtgagttgattggttaa

SEQ ID NO: 304 - DNA, 2196 bp, Artificial Sequence
  Synthetic
atgacagaattttattctgacacaatcggtctaccaaagacagatccacgtctttggagactgagaactgatgagctaggccgagaaagctgggaatatttaacccctcagcaagccgcaaacgacccaccatctacctttacacaatggctactgcaagatcccaaatttcctcaacctcatccagaaagaaataagcattcaccagatttttcagccttcgatgcgtgtcataatggtgcatcttttttcaaactgcttcaagagcctgactcaggtatttttccgtgtcaatataaaggacccatgttcatgacaatcggttacgtagccgtaaactatatcgccggtattgaaattcctgagcatgagagaatagaattaattagatacatcgtcaatactgctcaccctgtcgacggaggttggggtctacattctgttgacaaatccaccgtgtttggtacagtattgaactatgtaatcttacgtttattgggtctacccaaggaccacccggtttgcgccaaggcaagaagcacattgttaaggttaggcggtgctattggatcccctcactggggaaaaatttggctaagtgcactaaacttgtataaatgggaaggtgtgaaccctgcccctcctgaaacttggttacttccatattcactgcccatgcatccggggagatggtgggttcatactagaggtgtttacattccggtcagttacctgtcattggtcaaattttcttgcccaatgactcctcttcttgaagaactgaggaatgaaatttacactaaaccgtttgacaagattaacttctccaagaacaggaataccgtatgtggagtagacctatattacccccattctactactttgaatattgcgaacagccttgtagtattttacgaaaaatacctaagaaaccggttcatttactctctatccaagaagaaggtttatgatctaatcaaaacggagttacagaatactgattccttgtgtatagcacctgttaaccaggcgttttgcgcacttgtcactcttattgaagaaggggtagactcggaagcgttccagcgtctccaatataggttcaaggatgcattgttccatggtccacagggtatgaccattatgggaacaaatggtgtgcaaacctgggattgtgcgtttgccattcaatactttttcgtcgcaggcctcgcagaaagacctgaattctataacacaattgtctctgcctataaattcttgtgtcatgctcaatttgacaccgagtgcgttccaggtagttatagggataagagaaagggggcttggggcttctcaacaaaaacacagggctatacagtggcagattgcactgcagaagcaattaaagccatcatcatggtgaaaaactctcccgtctttagtgaagtacaccatatgattagcagtgaacgtttatttgaaggcattgatgtgttattgaacctacaaaacatcggatcttttgaatatggttcctttgcaacctatgaaaaaatcaaggccccactagcaatggaaaccttgaatcctgctgaagtttttggtaacataatggtagaatacccatacgtggaatgtactgattcatccgttctggggttgacatattttcacaagtacttcgactataggaaagaggaaatacgtacacgcatcagaatcgccatcgaattcataaaaaaatctcaattaccagatggaagttggtatggaagctggggtatttgttttacatatgccggtatgtttgcattggaggcattacacaccgtgggggagacctatgagaattcctcaacggtaagaaaaggttgcgacttcttggtcagtaaacagatgaaggatggcggttggggggaatcaatgaagtccagtgaattacatagttatgtggatagtgaaaaatcgctagtcgttcaaaccgcatgggcgctaattgcacttcttttcgctgaatatcctaataaagaagtcatcgaccgcggtattgaccttttaaaaaatagacaagaagaatccggggaatggaaatttgaaagtgtagaaggtgttttcaaccactcttgtgcaattgaatacccaagttatcgattcttattccctattaaggcattaggtatgtacagcagggcatatgaaacacatacgctttaa

SEQ ID NO: 305 - protein, 520 aa, Unknown; identical to SEQ ID NO: 280
  Siraitia grosvenorii

SEQ ID NO: 306 - protein, 692 aa, Arabidopsis thaliana [sequence omitted]

SEQ ID NO: 307 - protein, 701 aa, Unknown; identical to SEQ ID NO: 282
  Siraitia grosvenorii

SEQ ID NO: 308 - protein, 759 aa, Unknown; identical to SEQ ID NO: 247
  Siraitia grosvenorii

SEQ ID NO: 309 - protein, 316 aa, Unknown; identical to SEQ ID NO: 286
  Siraitia grosvenorii

SEQ ID NO: 310 - protein, 316 aa, Unknown; identical to SEQ ID NO: 287
  Siraitia grosvenorii

SEQ ID NO: 311 - protein, 444 aa, Saccharomyces cerevisiae
MGKLLQLALHPVEMKAALKLKFCRTPLFSIYDQSTSPYLLHCFELLNLTSRSFAAVIRELHPELRNCVTLFYLILRALDTIEDDMSIEHDLKIDLLRHFHEKLLLTKWSFDGNAPDVKDRAVLTDFESILIEFHKLKPEYQEVIKEITEKMGNGMADYILDENYNLNGLQTVHDYDVYCHYVAGLVGDGLTRLIVIAKFANESLYSNEQLYESMGLFLQKTNIIRDYNEDLVDGRSFWPKEIWSQYAPQLKDFMKPENEQLGLDCINHLVLNALSHVIDVLTYLASIHEQSTFQFCAIPQVMAIATLALVFNNREVLHGNVKIRKGTTCYLILKSRTLRGCVEIFDYYLRDIKSKLAVQDPNFLKLNIQISKIEQFMEEMYQDKLPPNVKPNETPIFLKVKERSRYDDELVPTQQEEEYKFNMVLSIILSVLLGFYYIYTLHRA

SEQ ID NO: 312 - protein, 496 aa, Saccharomyces cerevisiae
MSAVNVAPELINADNTITYDAIVIGAGVIGPCVATGLARKGKKVLIVERDWAMPDRIVGELMQPGGVRALRSLGMIQSINNIEAYPVTGYTVFFNGEQVDIPYPYKADIPKVEKLKDLVKDGNDKVLEDSTIHIKDYEDDERERGVAFVHGRFLNNLRNITAQEPNVTRVQGNCIEILKDEKNEVVGAKVDIDGRGKVEFKAHLTFICDGIFSRFRKELHPDHVPTVGSSFVGMSLFNAKNPAPMHGHVILGSDHMPILVYQISPEETRILCAYNSPKVPADIKSWMIKDVQPFIPKSLRPSFDEAVSQGKFRAMPNSYLPARQNDVTGMCVIGDALNMRHPLTGGGMTVGLHDVVLLIKKIGDLDFSDREKVLDELLDYHFERKSYDSVINVLSVALYSLFAADSDNLKALQKGCFKYFQRGGDCVNKPVEFLSGVLPKPLQLTRVFFAVAFYTIYLNMEERGFLGLPMALLEGIMILITAIRVFTPFLFGELIG

SEQ ID NO: 313 - protein, 731 aa, Saccharomyces cerevisiae
MTEFYSDTIGLPKTDPRLWRLRTDELGRESWEYLTPQQAANDPPSTFTQWLLQDPKFPQPHPERNKHSPDFSAFDACHNGASFFKLLQEPDSGIFPCQYKGPMFMTIGYVAVNYIAGIEIPEHERIELIRYIVNTAHPVDGGWGLHSVDKSTVFGTVLNYVILRLLGLPKDHPVCAKARSTLLRLGGAIGSPHWGKIWLSALNLYKWEGVNPAPPETWLLPYSLPMHPGRWWVHTRGVYIPVSYLSLVKFSCPMTPLLEELRNEIYTKPFDKINFSKNRNTVCGVDLYYPHSTTLNIANSLVVFYEKYLRNRFIYSLSKKKVYDLIKTELQNTDSLCIAPVNQAFCALVTLIEEGVDSEAFQRLQYRFKDALFHGPQGMTIMGTNGVQTWDCAFAIQYFFVAGLAERPEFYNTIVSAYKFLCHAQFDTECVPGSYRDKRKGAWGFSTKTQGYTVADCTAEAIKAIIMVKNSPVFSEVHHMISSERLFEGIDVLLNLQNIGSFEYGSFATYEKIKAPLAMETLNPAEVFGNIMVEYPYVECTDSSVLGLTYFHKYFDYRKEEIRTRIRIAIEFIKKSQLPDGSWYGSWGICFTYAGMFALEALHTVGETYENSSTVRKGCDFLVSKQMKDGGWGESMKSSELHSYVDSEKSLVVQTAWALIALLFAEYPNKEVIDRGIDLLKNRQEESGEWKFESVEGVFNHSCAIEYPSYRFLFPIKALGMYSRAYETHTL

SEQ ID NO: 314 - DNA, 1422 bp, Artificial Sequence
  Synthetic
atgtggactgtcgtgctcggtttggcgacgctgtttgtcgcctactacatccattggattaacaaatggagagattccaagttcaacggagttctgccgccgggcaccatgggtttgccgctcatcggagaaacgattcaactgagtcgacccagtgactccctcgacgttcaccctttcatccagaaaaaagttgaaagatacgggccgatcttcaaaacatgtctggccggaaggccggtggtggtgtcggcggacgcagagttcaacaactacataatgctgcaggaaggaagagcagtggaaatgtggtatttggatacgctctccaaatttttcggcctcgacaccgagtggctcaaagctctgggcctcatccacaagtacatcagaagcattactctcaatcacttcggcgccgaggccctgcgggagagatttcttccttttattgaagcatcctccatggaagcccttcactcctggtctactcaacctagcgtcgaagtcaaaaatgcctccgctctcatggtttttaggacctcggtgaataagatgttcggtgaggatgcgaagaagctatcgggaaatatccctgggaagttcacgaagcttctaggaggatttctcagtttaccactgaattttcccggcaccacctaccacaaatgcttgaaggatatgaaggaaatccagaagaagctaagagaggttgtagacgatagattggctaatgtgggccctgatgtggaagatttcttggggcaagcccttaaagataaggaatcagagaagttcatttcagaggagttcatcatccaactgttgttttctatcagttttgctagctttgagtccatctccaccactcttactttgattctcaagctccttgatgaacacccagaagtagtgaaagagttggaagctgaacacgaggcgattcgaaaagctagagcagatccagatggaccaattacttgggaagaatacaaatccatgacttttacattacaagtcatcaatgaaaccctaaggttggggagtgtcacacctgccttgttgaggaaaacagttaaagatcttcaagtaaaaggatacataatcccggaaggatggacaataatgcttgtcaccgcttcacgtcacagagatccaaaagtctataaggaccctcatatcttcaatccatggcgttggaaggacttggactcaattaccatccaaaagaacttcatgccttttgggggaggcttaaggcattgtgctggtgctgagtactctaaagtctacttgtgcaccttcttgcacatcctctgtaccaaataccgatggaccaaacttgggggaggaaggattgcaagagctcatatattgagttttgaagatgggttacatgtgaagttcacgccaaaagaataa

SEQ ID NO: 315 - protein, 473 aa, Unknown; identical to SEQ ID NO: 281
  Siraitia grosvenorii

SEQ ID NO: 316 - protein, 742 aa, Artificial sequence
  Synthetic
MGIHESVSKQFAKNGHSKYRSDRYGLPKTDLRRWTFHASDLGAQWWKYDDTTPLEELEKRATDYVKYSLELPGYAPVTLDSKPVKNAYEAALKNWHLFASLQDPDSGAWQSEYDGPQFMSICYVTACYFGGNEIPTPVKTEMIRYIVNTAHPVDGGWGLHKEDKSTCFGTSINYVVLRLLGLSRDHPVCVKARKTLLTKFGGAINNPHWGKTWLSILNLYKWEGVNPAPGELWLLPYFVPVHPGRWWVLTRWIYLAMGYLEAAEAQCELTPLLEELRDEIYKKPYSEIDFSKHCNSISGVDLYYPHTGLLKFGNALLRRYRKFRPQWIKEKVKEEIYNLCLREVSNTRHLCLAPVNNAMTSIVMYLHEGPDSANYKKIAARWPEFLSLNPSGMFMNGTNGLQVWDTAFAVQYACVCGFAELPQYQKTIRAAFDFLDRSQINEPTEENSYRDDRVGGWPFSTKTQGYPVSDCTAEALKAIIMVQNTPGYEDLKKQVSDKRKHTAIDLLLGMQNVGSFEPGSFASYEPIRASSMLEKINPAEVFGNIMVEYPYVECTDSVVLGLSYFRKYHDYRNEDVDRAISAAIGYIIREQQPDGGFFGSWGVCYCYAHMFAMEALETQNLNYNNCSTVQKACDFLAGYQEADGGWAEDFKSCETQMYVRGPHSLVVPTAMALLSLMSGRYPQEDKIHAAARFLMSKQMSNGEWLKEEMEGVFNHTCAIEYPNYRFYFVMKALGLYFMGYCQ

SEQ ID NO: 317 - protein, 742 aa, Artificial sequence
  Synthetic
MGIHESVSKQFAKNGHSKYRSDRYGLPKTDLRRWTFHASDLGAQWWKYDDTTPLEELEKRATDYVKYSLELPGYAPVTLDSKPVKNAYEAALKNWHLFASLQDPDSGAWQSEYDGPQFMSICYVTACYFGGNEIPTPVKTEMIRYIVNTAHPVDGGWGLHKEDKSTCFGTSINYVVLRLLGLSRDHPVCVKARKTLLTKFGGAINNPHWGKTWLSILNLYKWEGVNPAPGELWLLPYFVPVHPGRWWVLTRWIYLAMGYLEAAEAQCELTPLLEELRDEIYKKPYSEIDFSKHCNSISGVDLYYPHTGLLKFGNALLRRYRKFRPQWIKEKVKEEIYNLCLREVSNTRHLCLAPVNNAMTSIVMYLHEGPDSANYKKIAARWPEFLSLNPSGMFMNGTNGLQVWDTAFAVQYACVCGFAELPQYQKTIRAAFDFLDLSQINEPTEENSYRDDRVGGWPFSTKTQGYPVSDCTAEALKAIIMVQNTPGYEDLKKQVSDKRKHTAIDLLLGMQNVGSFEPGSFASYEPIRASSMLEKINPAEVFGNIMVEYPYVECTDSVVLGLSYFRKYHDYRNEDVDRAISAAIGYIIREQQPDGGFFGSWGVCYCYAHMFAMEALETQNLNYNNCSTVQKACDFLAGYQEADGGWAEDFKSCETQMYVRGPHSLVVPTAMALLSLMSGRYPQEDKIHAAARFLMSKQMSNGEWLKEEMEGVFNHTCAIEYPNYRFYFVMKALGLYFMGYCQ

SEQ ID NO: 318 - protein, 742 aa, Artificial sequence
  Synthetic
MGIHESVSKQFAKNGHSKYRSDRYGLPKTDLRRWTFHASDLGAQWWKYDDTTPLEELEKRATDYVKYSLELPGYAPVTLDSKPVKNAYEAALKNWHLFASLQDPDSGAWQSEYDGPQFMSIGYVTACYFGGNEIPTPVKTEMIRYIVNTAHPVDGGWGLHKEDKSTCFGTSINYVVLRLLGLSRDHPVCVKARKTLLTKFGGAINNPHWGKTWLSILNLYKWEGVNLAPGELWLLPYFVPVHPGRWWVHTRWIYLAMGYLEAAEAQCELTPLLEELRDEIYKKPYSEIDFSKHCNSISGVDLYYPHTGLLKFGNALLRRYRKFRPQWIKEKVKEEIYNLCLREVSNTRHLCLAPVNNAMTSIVMYLHEGPDSANYKKIAARWPEFLSLNPSGMFMNGTNGLQVWDTAFAVQYACVCGFAELPQYQKTIRAAFDFLDRSQINEPTEENSYRDDRVGGWPFSTKTQGYPVSDCTAVALKAIIMVQNTPGYEDLKKQVSDKRKHTAIDLLLGMQNVGSFEPGSFASYEPIRASSMLEKINPAEVFGNIMVEYPYVECTDSVALGLSNFRKYHDYRNEDVDRAISAAIGYIIREQQPDGGFFGSWGVCYCYAHMFAMEALETQNLNYNNCSTVQKACDFLAGYQEADGGWAEDFKSCETQMYVRGPHSLVVPTAMALLSLMSGRYPQEDKIHAAARFLMSKQMSNGEWLKEEMEGVFNHTCAIEYPNYRFYFVMKALGLYFKGYCQ

SEQ ID NO: 319 - protein, 742 aa, Artificial sequence
  Synthetic
MGIHESVSKQFAKNGHSKYRSDRYGLPKTDLRRWTFHASDLGAQWWKYDDTTPLEELEKRATDYVKYSLELPGYAPVTLDSKPVKNAYEAALKNWHLFASLQDPDSDAWQSEYDGPQFMSIGYVTACYFGGNEIPTPVKTEMIRYIVNTAHPVDGGWGLHKEDKSTCFGTSINYVVLRLLGLSRDHPVCVKARKTLLTKFGGAINNPHWGKTWLSILNLYKWEGVNPAPGELWLLPYFVPVHPGRWWVHTRWIYLAMGYLEAAEAQCELTPLLEELRDEIYKKPYSEIDFSKHCNSISGVDLYYPHTGLLKFGNALLRRYRKFRPQWIKEKVKEEIYNLCLREVSNTRHLCLAPVNNAMTSIVMYLHEGPDSANYKKIAARWPEFLSLNPSGMFMNGTNGLQVWDTAFAVQYACVCGFAELPQYQKTIRAAFDFLDRSQINEPTEENSYRDDRVGGWPFSTKTQGYPVSDCTAEALKAIIMVQNTPGYEDLKKQVSDKRKHTAIDLLLGMQNVGSFEPGSFASYEPIRASSMLEKINPAEVFGNIMVEYPYVECTDSVVLGLSYFRKYHDYRNEDVDRAISAAIGYIIREQQPDGGFFGSWGVCYCYAHMFAMEALETQNLNYNNCSTVQEACDFLAGYQEADGGWAEDFKSCETQMYVRGPHSLVVPTAMALLSLMSGRYPQEDKIHAAARFLMSKQMSNGEWLKEEMEGVFNHTCAIEYPNYRFYFVMKALGLYFKGYCQ

SEQ ID NO: 320 - skipped

SEQ ID NO: 321 - protein, 741 aa, Artificial sequence
  Synthetic
MGIHESVSKQFAKNGHSKYRSDRYGLPKTDLRRWTFHASDLGAQWWKYDDTTPLEELEKRATDYVKYSLELPGYAPVTLDSKPVNNAYEAALKNWHLFASLQDPDSGAWQSEYDGPQFMSIGYVTACYFGGNEIPTPVKTEMIRYIVNTAHPVDGGWSLHKEDKSTCFGTSINYVVLRLLGLSRDHPVCVKARKTLLTKFGGAINNPHWGKTWLSILNLYKWEGVNPAPGELWLLPYFVPVHPGRWWVHTRWIYLAMGYLEAAEAQCELTPLLEELRDEIYKKPYSEIDFSKHCNSISGVDLYYPHTGLLKFGNALLRRYRKFRPQWIKEKVKEEIYNLCLREVSNTRHLCLAPVNNAMTSIVMYLHEGPDSANYKKIAARWPEFLSLNPSGMFMNGTNGLQVWDTAFAVQYACVCGFAELPQYQKTIRAAFDFLDRSQINEPTEENSYRDDRVGGWPFSTKTQGYPVSDCTAEALKAIIMVQNTPGYEDLKKQVSDKRKHTAIDLLLGMQNVGLFEPGSFASYETIRASSMLEKINPAEVFGNIMVEYPYVECTDSVVLGLSYFRKYHDYRNEDVDRAISAAIGYIIREQQPDGGFFGSWGVCYCYAHMFAMEALETLNLNYNNCSTVQKACDFLAGYQEADGGWAEDFKSCETQMYVRGPHSLVVPTAMALLSLMSGRYPQEDKIHAAARFLMSKQMSNGEWLKEEMEGVFNHTCAIEYPNYRFYFVMKALGLYFKGYC

SEQ ID NO: 322 - protein, 742 aa, Artificial sequence
  Synthetic
MGIHESVSKQFAKNGHSKYRSDRYGLPKTDLRRWTFHASDLGAQWWKYDDTTPLEELEKRATDYVKYSLELPGYAPVTLDSKPVKNAYEAALKNWHLFASLQDPDSGAWQSEYDGPQFMSIGYVTACYFGGNEIPTPVKTEMIRYIVNTAHPVDGGWGLHKEDKSTCFGTSINYVVLRLLGLSRDHPVCVKARKTLLTKFGGAINNPHWGKILLSILNLYKWEGVNPAPGELWLLPYFVPVHPGRWWVHTRWIYLAMGYLEAAEAQCELTPLLEELRDEIYKKPYSEIDFSKHCNSISGVDLYYPHTGLLKFGNALLRRYRKFRPQWIKEKVKEEIYNLCLREVSNTRHLCLAPVNNAMTSIVMYLHEGPDSANYKKIAARWPEFLSLNPSGMFMNGTNGLQVWDTAFAVQYACVCGFAELPQYQKTIRAAFDFLDRSQINEPTEENSYRDDRVGGWPFSTKTQGYPVSDCTAEALKAIIMVQNTPGYEDLKKQVSDKRKHTAIDLLLGMQNVGSFEPGSFASYEPIRASSMLEKINPAEVFGYIMVEYPYEECTDSVVLGLSYFRKYHDYRNEDVDRAISAAIGYIIREQQPDGGFFGSWGVCYCYAHMFAMEALETQNLNYNNCSTVQKACDFLAGYQEADGGWAEDFKSCETQMYVRGPHSLVVPTAMALLSLMSGRYPQEDKIHAAARFLMSKQMSNGEWLKEEMEGVFNHTCAIEYPNYRFYFVMKALGLYFKGYCQ

SEQ ID NO: 323 - protein, 742 aa, Artificial sequence
  Synthetic
MGIHESVSKQFAKNGHSKYRSDRYGLPKTDLRRWTFHASDLGAQWWKYDDTTPLEELEKRATDYVKYSLELPGYAPVTLDSKPVKNAYEAALKNWHLFASLQDPDSGAWQSEYDGPQFMSIGYVTACYFGGNEIPTPVKTEMIRYIVNTAHPVDGGWGLHKEDKSTCFGTSINYVVLRLLGLSRDHPVCVKARKTLLTKFGGAINNPHWGKTWLSILNLYKWEGVNPAPGVLWLLPYFVPVHPGRWWVHTRWIYLAMGYLEAAEAQCELTPLLEELRDEIYKKPYSEIDFSKHCNSISGVDLYYPHTGLLKFGNALLRRYRKFRPQWIKEKVKEEIYNLCLREVSNTRHLCLAPVNNAMTSIVMYLHEGPDSANYKKIAARWPEFLSLNPSGMFMNGTNGLQVWDTVFAVQYACVCGFAELPLYQKTIRAAFDFLDRSQINEPTEENSYRDDRVGGWPFSTKTQGYPVSDCTAEALKAIIMVQNTPGYEDLKKQVSDKRKHTAIDLLLGMQNVGSFEPGSFASYEPIRTSSMLEKINPAEVFGNIMVEYPYVECTDSVVLGLSCFRKYHDYRNEDVDRAISAAIGYIIREQQPDGGFFGSWGVCYCYAHMFAMEALETQNLNYNNCSTVQKACDFLAGYQEADGGWAEDFKSCETQMYVRGPHSLVVPTAMALLSLMSGRYPQEDKIHAAARFLMSKQMSNGEWLKEEMEGVFNHTCAIEYPNYRFYFVMKALGLYFKGYCQ

SEQ ID NO: 324 - protein, 742 aa, Artificial sequence
  Synthetic
MGIHESVSKQFAKNGHSKYRSDRYGLPKTDLRRWTFHASDLGAQWWKYDDTTPLEELEKRATDYVKYSLELPGYAPVTLDSKPVKNAYEAALKNWHLFASLQDPDSGAWQSEYDGPQFMSIGYVTACYFGGNEIPTPVKTEMIRYIVNTAHPVDGGWGLHKEDKSTCFGTSINYVVLRLLGLSRDHPVCVKARKTLLTKFGGAINNPHWGKTWLSILNLYKWEGVNPAPGELWLLPYFVPVHPGRWWVHTRWIYLAMGYLEAAEAQCELTPLLEELRDEIYKKPYSGIDFSKHCNSISGVDLYYPHTGLLKFGNALLRRYRKFRPQWINEKVKEEIYNLCLREVSNTRHLCLAPVNNAMTSIVMYLHEGPDSANYKKIAARWPEFLSLNPSGMFMNGTNGLQVWDTAFAVQYACVCGFAELPQYQKTIRAAFDFLDRSQINEPTEENSYRDDRVGGWPFSTKTQGYPVSDCTAEALKAIIMVQNTPGYEDLKKQVSDKRKHTAIDLLLGMQNVGSFEPGSFASYEPIRASSMLEKINPAEVFGNIMVEYPYVECTDSVVLGLSYFRKYHDYRNEDVDRAISAAIGYIIREQQPDGGFFGSWGVCYCYAHMFAMEALVTQNLNYNNCSTVQKACDFLAGYQEADGGWAEDFKSCETQMYVRGPHSLVVPTAMALLSLMSGRYPQEDKIHAAARFLMSKQMSNGEWLKEEMEGVFNHTCAIEYPNYRVYFVMKALGLYFKGYCQ

SEQ ID NO: 325 - protein, 742 aa, Artificial sequence
  Synthetic
MGIHESVSKQFAKNGHSKYRSDRYGLPKTDLRRWTFHASDLGAQWWEYDDTTPLEELEKRATDYVKYSLELPGYAPVTLDSKPVKNAYEAAIKNWHLFASLQDPDSGAWQSEYDGPQFMSIGYVTACYFGGNEIPTPVKTEMIRYIVNTAHPVDGGWGLHKEDKSTCFGTSINYVVLRLLGLSRDHPVCVKARKTLLTKFGGAINNPHWGKTWLSILNLYKWEGVNPAPGELWLLPYFVPVHPGRWWVHTRWIYLAMGYLEAAEAQCELTPLLEELRDEIYKKPYSEIDFSKHCNSISGVDLYYPHTGLLKFGNALLRRYRKFRPQWIKEKVKEEIYNLCLREVSNTRHLCLAPVNNAMSSIVMYLHEGPDPANYKKIAARWPEFLSLNPSGMFMNGTNGLQVWDTAFAVQYACVCGFAELPQYQKTIRAAFDFLDRSQINEPMEENSYRDDRVGGWPFSTKTQGYPVSDCTAEALKAIIMVQNTPGYEDLKKQVSDKRKHTAIDLLLGMQNVGSFEPGSFASYEPIRASSMLEKINPAEVFGNIMVEYPYVECTDSVVLGLSYFRKYHDYRNEDVDPAISAAIGYIIREQQPDGGFFGSWGVCYCYAHMFAMEALETQNLNYNNCSTVQKACDFLAGYQEADGGWAEDFKSCETQMYVRGPHSLVVPTAMALLSLMSGRYPQEDKIHAAARFLMSKQMSNGEWLKEEMEGVFNHTCAIEYPNYRFYFVMKALGLYFKGYCQ

SEQ ID NO: 326 - protein, 742 aa, Artificial sequence
  Synthetic
MGIHESVSKQFAKNGHSKYRSDRYGLPKTDLRRWTFHASDLGAQWWKYDDTTPLEELEKRATDYVKYSLELPGYAPVTLDSKPVKNAYEAALKNWHLFASLQDPDSGAWQSEYDGPQFMSIGYVTACYFGGNEIPTPVKTEMIRYIVNTAHPVDGGWGLHKEDKSTCFGTSINYVVLRLLGLSRDHPVCVKARKTLVTKFGGAINNPHWGKTWLSILNLYKWEGVNPAPGELWLLPYFVPVHPGRWWVHTRWIYLAMGYLEAAEAQCELTPLLEELRDEIYIKPYSEIDFSKHCNSISGVDLYYPHTGLLKFGSALLRRYRKFRPQWIKEKVKEEIYNLCLREVSNTRHLCLAPVNNAMTSIVMYLHEGLDSANYKKIAARWPEFLSLNPSGMFMNGTNGLQVWDTAFAVQYACVCGFAELPQYQKTIRAAFDFLDRSQINEPTEENSYRDDRVGGWPFSTKTQGYPVSDCTAEALKAIIMVQNTPGYEDLKKQVSDKRKHTAIDLLLGMQNVGSFEPGSFASYEPIRASSMLEKINPAEVFGNIMVEYPYVECTDSVVLGLSYFRKYHDYRNEDVDRAISAAIGYIIREQQPDGGFFGSWGVCYCYTHMFAMEALETQNLNYNNCSTVQKACDFLADYQEADGGWAEDLKSCETQMYVRGPHSLVVPTAMALLSLMSGRYPQEDKIHAAARFLMSKQMSNGEWLKEEMEGVFNHTCAIEYPNYRFYFVMKALGLYFKGYCQ

SEQ ID NO: 327 - DNA, 2286 bp, Artificial sequence
  Synthetic
atgtggagacttaagaccggttccgagactgtcggcgacaacggccgatggcttcgaagcaccaacaaccatgtgggtcgacaggtctgggagttcttccccgagatgggctcccccgaggagctggtcgccattgaggccgcccaccgagagttccacctcaatcgattccacaagcagcattcttccgacctgctgatgcgacttcagtacgagcgagagaagccatgtgttcagaaggagggcgccgttcgacttgacgcaaccgaaacccctaccgaggcggccgttgagactaccctgcgaagggcccttacattctactctactatgcagtccgacgacgggcattgggccaacgacctgggtggacccatgttcctcctacccggactggttattactctgaccatcaccggcaccatcaacgttgttctgagcaaggagcatcagcgagagattcgacgatacctctacaaccatcagaatcaggatggcggatggggcctgcatattgagggccctagcactatgttcggctctgcccttaactacgtcacgctacgacttcttggggagggccccgacgacggcgaaggtgccatggagcgtgcacgacagtggattttgagccgaggtggcgcggttgcagtcacttcttggggcaagctctggctttcggtcctgggcgtttacgagtgggatggcaacaaccccctgcctcccgaactctggttattgccctactcccttcctctccaccccggccggatgtggtgccactgccgaatggtgtaccttcccatgtcgtacttgtacggtaagcgattcgtgggtcccatcacacccacggtactcagtcttcgagaggagctctaccccatcccctaccatcatgtggactggaacaaggcccgaaacacttgtgcccaggacgatttgtactaccctcatccgttcgttcaggacctgctttggggttccctctaccacgtctacgagccccttgttatgcgatggcccggaaagcgattgcgagagagagcgcttcagcacgtcatgaagcacatacactatgaggatgagaacactgagtacatctgcctcggccccgtgaacaaggccctcaacatgctgtgttgttgggtcgaggacccccactcagaggccttcaagatgcacatcccacgcatttacgactacctctggattgcagaggatgggatgaagatgcagggttacaacggcagccagctctgggacaccgcctttgccgttcaagccattgtcgccaccaagctcactgatgagttttccgaaaccctcgccaaggcgaataagtacattctcgacgctcaaatcctgaagaactgtccaggcgaccccaacgtttggtaccgacacatcacaaagggcgcctggtccttctccactgctgaccagggctggctggtttctgactgtactgctgagggtctgaaagcccttctgctgtactccatgctgcctcaccagaaggccccctcctctatcgaaaagaaccgactgtacgacgctgtgaacgtccttctgtctatgcagaacgcggacggtggcttcgcttctttcgagttgacccgtagctacccctggctggagatgatcaaccccgctgagacatttggcgatatcgttatcgattacacctacgtcgagtgtacatccgccgttatccaggccctcgccctcttcaagcgactccatcccggtcaccgaaagaaggagatcgagcgctgcatggccaacgcggctaagtttcttgagatgcgacaggaggctgacggctcttggtacggttgctggggcgtgtgctacacctacgcaggttggttcggcatcaagggcctcacatcctgtggccgaacatacaacaactgtgccaacatcagacgagcatgcgatttcctcctctctaagcagctgcctaacggaggctggggcgaatcatacttatcctgccaaaacaagctgtacacaaacctcaataacgaccgaatgcacactgtcaacaccgcttgggcaatgatggctctgatcgaggctggccaggctaagaccgaccctatgcccttgcatcacgccgcgcgaaccctcattaacgcccagatggaaacaggagacttcccccagcaggagatcatgggcgttttcaataagaactgcatgatttcttacgcgggctaccgaaacgttttccctgtgtgggctttgggtgagtaccaccaccgagttcttaacggttgctaa

SEQ ID NO: 328 - DNA, 2229 bp, Artificial sequence
  Synthetic
atgggaatccacgaaagtgtgtcgaaacagtttgcgaaatacggacattccaagtaccgcagcgaccgatacggcttacctaagacggatctgcgacgatggacgttccacgcgtccgatctgggggcgcaatggtggaagtatgacgataccacaccgctggaagagctggaaaagagggctaccgactacgtcaaatactcgctggagctgccgggatacgcgcccgtgactctggactccaagcccgtgaaaaatgcctacgaagcggctctcaaaaactggcatctgtttgcgtcgctgcaagaccccgactccggcgcatggcagtcggaatacgacggaccgcagttcatgtcgatcggttatgtgacggcgtgctactttggcggcagcgagatccccacgccggtcaaaaccgaaatgatcagatgcattgtcaacacagcccacccagttgacggaggctggggccttcataaagaagacaagagcacctgtttcggtaccagcatcaactacgtggtcctgcgactactgggcctgtcacgggatcatccggtctgcgtcaaggcgcacaaaacgctgctcaccaagtttggcggcgccatcaacaacccccattggggcaagacctggctgtcgattctcaatctctacaaatgggagggtgtgaatccggcccctggcgagctctggctgttgccctactttgttcctgttcatccgggccgatggtgggtccatacccggtggatctaccttgccatgggctatctggaggctgcggaggcccaatgcgaactcactccgttgctggaggagctccgagacgaaatctacaaaaagccctactcggagtttgatttctccaaacattgcaactccatctccggagtcgacctctactatccccacaccggccttttgaagtttggcaacgcgcgtctccgacgataccgcaagttcagaccgcagtggatcaaagaaaaggtcaaggaggaaatttacaacttgtgccttcgagaggtttccaacacacgacacttgtgtctcgctcccgtcaacaatgccatgacctccattgtcatgtatctccatgaggggcccgattcggcgaattacaaaaagattgcggcccgatggcccgaatttctgtctctgaatccgtcgggaatgtttatgaacggcaccaacggtctgcaggtctgggatactgcgtttgccgtgcaatacgcgtgtgtttgtggctttgccgaacttccccagtaccagaagacgatccgagcggcgattgattttctcgatcggtcccagatcaacgtgccgtcggaggaaaattcctatcgagacgaccgcgtcggaggatggccctttagtaccaagacccaggggtatccagtctccgactgtactgccgaggctctcaaggccagcatcatggtccagaatacgcctggatacgaggatctgaagaaacaagtgtctgacaagcggaaacacactgccatcgatctacttttgggaatgcagaacgtgggctcgtttgaaccgggctctttcgcctcctatgagcctatccgggcgtcgtccatgctggagaagatcaatccggccgaggtgtttggaaacatcatggtggagtatccgtacgtggaatgcactgattctgttgttctgggtctgtcctactttcgaaagtaccacgattaccgcaacgaagacgtggaccgagccatctctgctgccattggatacattattcgagagcagcagcctgacggcggcttctttggctcctggggcgtgtgctactgctacgctcacatgtttgccatggaggctctggagacgcagaatctcaactataacaactgttccacggttcaaagggcgtgcgactttctggcgggctaccaggaagcagatggaggctgggccgaggactttaagtcgtgcgaggctcagatgtacgtgcgcggaccccattcgctggtcgtgcctactgccatggccctgttgagtttgatgagtggtcggtatccccaggaggacaagattcatgctgcggcccggtttctcatgagcaagcagatgagcaatggtgagtggctcaaggaggagatggagggggtgtttaaccatacttgtgccattgagtatcccaactaccggttttattttgtcatgaaggctttggggttgtatttcaagggatattgccagtga

SEQ ID NO: 329 - protein, 742 aa, Artificial sequence
  Synthetic
MGIHESVSKQFAKYGHSKYRSDRYGLPKTDLRRWTFHASDLGAQWWKYDDTTPLEELEKRATDYVKYSLELPGYAPVTLDSKPVKNAYEAALKNWHLFASLQDPDSGAWQSEYDGPQFMSIGYVTACYFGGSEIPTPVKTEMIRCIVNTAHPVDGGWGLHKEDKSTCFGTSINYVVLRLLGLSRDHPVCVKAHKTLLTKFGGAINNPHWGKTWLSILNLYKWEGVNPAPGELWLLPYFVPVHPGRWWVHTRWIYLAMGYLEAAEAQCELTPLLEELRDEIYKKPYSEFDFSKHCNSISGVDLYYPHTGLLKFGNARLRRYRKFRPQWIKEKVKEEIYNLCLREVSNTRHLCLAPVNNAMTSIVMYLHEGPDSANYKKIAARWPEFLSLNPSGMFMNGTNGLQVWDTAFAVQYACVCGFAELPQYQKTIRAAIDFLDRSQINVPSEENSYRDDRVGGWPFSTKTQGYPVSDCTAEALKASIMVQNTPGYEDLKKQVSDKRKHTAIDLLLGMQNVGSFEPGSFASYEPIRASSMLEKINPAEVFGNIMVEYPYVECTDSVVLGLSYFRKYHDYRNEDVDRAISAAIGYIIREQQPDGGFFGSWGVCYCYAHMFAMEALETQNLNYNNCSTVQRACDFLAGYQEADGGWAEDFKSCEAQMYVRGPHSLVVPTAMALLSLMSGRYPQEDKIHAAARFLMSKQMSNGEWLKEEMEGVFNHTCAIEYPNYRFYFVMKALGLYFKGYCQ

SEQ ID NO: 330 - DNA, 2229 bp, Artificial sequence
  Synthetic
atgggaatccacgaaagtgtgtcgaaacagtttgcgaaaaacggacattccaagtaccgcagcgaccgatacggcttacctaagacggatctgcgacaatggacgttccacgcgtccgatctgggggcgcaatggtggaagtatgacgataccacaccgctggaagagttggaaaagagggctaccgactacgtcaaatactcgctggagctgccgggatacgcgcccgtgactctggactccaagcccgtgaaaaatgcctacgaagcggctctcaaaaactggcatctgtttgcgtcgctgcaagaccccgactccggcgcatggcagtcggaatacgacggaccgcagttcatgtcgatcggttatgtgacggcgtgctactttggcggcaacgagatccccacgccggtcaaaaccgaaatgatcagatacattgtcaacacagcccacccagttgacggaggctggggccttcacaaagaagacaagagcacctgtttcggtaccagcatcaactacgtggtcctgcgactactgggcctgtcgcgggatcatccggtctgcgtcaaggcgtgcaaaacgctgctcaccaagtttggcggcgccatcaacaacccccattggggcaagacctggctgtcgattctcaatctctacaaatgggagggtgtgaatccggcccctggcgagctctggctgttgccctactttgttcctgttcatccgggccgatggtgggtccatacccggtggatctaccttgccatgggctatctggaggctgcggaggcccaatgcgaactcactccgttgctggaggagctccgagacgaaatctacaaaaagccctactcggagattggtttctccaaacattgcatcaccatctccggagtcgacctctactatccccacaccggccttttgaagtttggcaacgcgcttctccgacgataccgcaagttcagaccgcagtggatcaaagaaaaggtcaaggaggaaatttataacttgtgccttcgagaggtttccaacacacgacacttgtgtctcgctcccgtcaacaatgccatgacctccattgtcatgtatctccatgaggggcccgattcggcgaattacaaaaagattgcggcccgatggcccgaatttctgtctctgaatccgtcgggaatgtttatgaacggcaccaacggtctgcaggtctgggatactgcgtttgccgtgcaatacgcgtgtgtttgtggctttgccgaacttccccagtaccagaagacgatccgagcggcgtttgattttctcgatcggtcccagatcaacgagccgacggaggaaaattcctatcgagacgaccgcgtcggaggatggccctttagtaccaagacccaggggtatccagtctccgactgtactgccgaggctctcaaggccatcatcatggtccagaatacgcctggatacgaggatctgaagaaacaagtgtctgacaagcggaaacacactgccatcgatctacttttgggaatgcagaacgtgggctcgtttgaaccgggctctttcgcctcctatgagcctatccgggcgtcgtccatgctggagaagatcaatccggccgaggtgtttggaaacatcatggtggagtatccgtacgtggaatgcactgattctgttgttctgggtctgtcctactttcgaaagtaccacgattaccgcaacgaagacgtggaccgagccatctctgctgccattggatacattattcgagagcagcagcctgacggcggcttctttggctcctggggcgtgtgctactgctacgctcacatgtttgccatggaggctctggagacgcagagtctcaactataacaactgttccacggttcaaaaggcgtgcgactttctggcgggctaccaggaagcagatggaggctgggccgaggactttaagtcgtgcgagactcagatgtacgtgcgcggaccccattcgctggtcgtgcctactgccatggccctgttgagtttgatgagtggtcggtatccccaggaggacaagattcatgctgcggcccggtttctcatgagcaagcagatgagcaacggtgagtggctcaaggaggagatggagggggtgtttaaccatacttgtgccattgagtatcccaactaccggttttattttgtcatgaaggctttggggttgtttttcaagggatattgccagtga

SEQ ID NO: 331 - protein, 742 aa, Artificial sequence
  Synthetic
MGIHESVSKQFAKNGHSKYRSDRYGLPKTDLRQWTFHASDLGAQWWKYDDTTPLEELEKRATDYVKYSLELPGYAPVTLDSKPVKNAYEAALKNWHLFASLQDPDSGAWQSEYDGPQFMSIGYVTACYFGGNEIPTPVKTEMIRYIVNTAHPVDGGWGLHKEDKSTCFGTSINYVVLRLLGLSRDHPVCVKACKTLLTKFGGAINNPHWGKTWLSILNLYKWEGVNPAPGELWLLPYFVPVHPGRWWVHTRWIYLAMGYLEAAEAQCELTPLLEELRDEIYKKPYSEIGFSKHCITISGVDLYYPHTGLLKFGNALLRRYRKFRPQWIKEKVKEEIYNLCLREVSNTRHLCLAPVNNAMTSIVMYLHEGPDSANYKKIAARWPEFLSLNPSGMFMNGTNGLQVWDTAFAVQYACVCGFAELPQYQKTIRAAFDFLDRSQINEPTEENSYRDDRVGGWPFSTKTQGYPVSDCTAEALKAIIMVQNTPGYEDLKKQVSDKRKHTAIDLLLGMQNVGSFEPGSFASYEPIRASSMLEKINPAEVFGNIMVEYPYVECTDSVVLGLSYFRKYHDYRNEDVDRAISAAIGYIIREQQPDGGFFGSWGVCYCYAHMFAMEALETQSLNYNNCSTVQKACDFLAGYQEADGGWAEDFKSCETQMYVRGPHSLVVPTAMALLSLMSGRYPQEDKIHAAARFLMSKQMSNGEWLKEEMEGVFNHTCAIEYPNYRFYFVMKALGLFFKGYCQ

SEQ ID NO: 332 - DNA, 2280 bp, Artificial Sequence
  Synthetic
atgtggcgactgaaggttggtgctgagtccgtaggcgaaaatgacgagaagtggctcaaatctatcagtaaccatcttggaagacaagtgtgggagttttgccctgatgccgggactcagcagcagctgttgcaggtccacaaggcccgtaaggcattccacgacgaccgattccaccgaaagcagtcgtctgaccttttcattaccatccagtatggtaaggaggttgagaacggtggcaagaccgctggtgtcaagctgaaggagggtgaggaggtccgcaaggaggccgttgagtcctctctcgaacgagcgctctccttttactcctctattcagacctccgatggcaactgggccagcgatctgggtggtcccatgttcttactgcccggattggtcatcgccctctacgttacgggtgtgctaaactctgttctgtccaagcaccatcgacaggagatgtgtcggtacgtctacaaccaccaaaacgaggacggtggctggggtcttcacattgagggaccatctaccatgttcggttcagctctaaactacgtcgccctccgactgcttggggaggacgctaacgccggtgcaatgcccaaggctcgagcctggatcctcgaccacggcggtgctactggtatcacctcctggggtaagctctggctgagtgtgcttggcgtctacgagtggtccggcaacaaccccctccctcccgagttctggctgtttccctacttcctgcctttccatcccggaaggatgtggtgtcactgccgaatggtctacttgcccatgtcttatctctacggtaagcgattcgttggtcccatcacccctatcgtcctgtcccttcgaaaggagctttacgccgtcccgtaccacgagattgattggaacaagtcccgaaacacttgtgccaaggaggacctctactaccctcaccccaagatgcaggacattctgtggggctcccttcatcacgtgtacgagcccctgttcacccgatggcccgctaagcgacttcgagagaaggccttgcagacagccatgcagcacatccactacgaagacgaaaatacccgatacatctgcctgggtcccgtcaacaaggttctgaacctcttgtgttgttgggtcgaggatccctactctgatgctttcaaactccacctccagcgagttcacgactacctgtgggttgccgaggacggaatgaagatgcagggatacaacggttctcagctctgggatactgcattttcgattcaggccatcgtcagcaccaagctggtagacaactacggaccgacactccgaaaggctcacgactttgttaagtcttcccagatccaacaggactgccccggtgatcccaacgtctggtacagacacattcataaaggtgcctggcctttctccacccgtgaccacggctggctcatttctgattgtaccgctgagggccttaaggccgccctgatgctgtccaagctcccctctgagactgtgggtgagtcgctcgagcgaaaccgactttgcgacgccgtgaacgttctccttagtctccagaacgacaacggtggtttcgcttcctatgagctgacccgttcctacccctggcttgaactgattaaccctgcggagacattcggtgatatcgtcatcgactacccctacgttgagtgtacgtctgccaccatggaggctcttaccctgtttaagaagctccatcctggtcaccgaaccaaggagattgacaccgccatcgtccgagccgctaatttcctggagaacatgcagcgaaccgacgggtcatggtacggttgctggggagtctgttttacctacgccggatggttcggtattaagggtcttgtcgccgctggccgaacttacaacaactgtttggccatcagaaaggcctgcgacttcctcctgtctaaggagctgcccggaggtggctggggcgaatcctatctctcctgtcagaataaggtttacaccaacttagagggtaacaggccccacttggtgaatactgcttgggttcttatggcgctgatcgaggccggtcaggcggagcgagatcccacccccctacaccgagctgcccgactgcttatcaactcccagctcgagaacggtgacttccctcaacaggagattatgggtgtttttaacaagaactgcatgatcacgtacgccgcctaccgaaacatcttccctatctgggctcttggtgaatactgtcaccgagtcctgaccgagtaa
